United States Patent Application Publication US 2005/0118625 A1 - sequence listing, part 13

SEQ ID NO: 307652 - DNA, 25 bp, Probe Sequence
tttgaaattctagagccagctgtgg

SEQ ID NO: 307653 - DNA, 25 bp, Probe Sequence
tttagaggctcttggacacacagtg

SEQ ID NO: 307654 - DNA, 25 bp, Probe Sequence
tatttagagcgcagcggctgacggg

SEQ ID NO: 307655 - DNA, 25 bp, Probe Sequence
tattttaggcccctgcaactgggga

SEQ ID NO: 307656 - DNA, 25 bp, Probe Sequence
tttgttgggcaccgaaatcacggga

SEQ ID NO: 307657 - DNA, 25 bp, Probe Sequence
tttgggggcaaactctattctggtg

SEQ ID NO: 307658 - DNA, 25 bp, Probe Sequence
ttctgggtaaagcactatgtctggg

SEQ ID NO: 307659 - DNA, 25 bp, Probe Sequence
tttgggttcaggctatgctgctttg

SEQ ID NO: 307660 - DNA, 25 bp, Probe Sequence
tttggtggtggtcttggacgtggtt

SEQ ID NO: 307661 - DNA, 25 bp, Probe Sequence
ttctgaggggggtttgggaggcttg

SEQ ID NO: 307662 - DNA, 25 bp, Probe Sequence
tttggggaggatttgctgaaaagtt

SEQ ID NO: 307663 - DNA, 25 bp, Probe Sequence
tttgtcaaaaagtctgctgtaccgt

SEQ ID NO: 307664 - DNA, 25 bp, Probe Sequence
tatatatctaaatgattctctaagg

SEQ ID NO: 307665 - DNA, 25 bp, Probe Sequence
tattactataattgagaactacagc

SEQ ID NO: 307666 - DNA, 25 bp, Probe Sequence
tatttccatagtttgatagtgccac

SEQ ID NO: 307667 - DNA, 25 bp, Probe Sequence
tatagtctatgatatttcagtcaca

SEQ ID NO: 307668 - DNA, 25 bp, Probe Sequence
tatagtcctatttgtagcattcaat

SEQ ID NO: 307669 - DNA, 25 bp, Probe Sequence
tataccctgtaatagcatactatta

SEQ ID NO: 307670 - DNA, 25 bp, Probe Sequence
tatactactctaaatagcatatttc

SEQ ID NO: 307671 - DNA, 25 bp, Probe Sequence
tatactactctaaatagcatatttc

SEQ ID NO: 307672 - DNA, 25 bp, Probe Sequence
tatatccactcaaagtacaatcatt

SEQ ID NO: 307673 - DNA, 25 bp, Probe Sequence
tattccaacagatgtaccttttgca

SEQ ID NO: 307674 - DNA, 25 bp, Probe Sequence
tttctaccttggaactgtattagat

SEQ ID NO: 307675 - DNA, 25 bp, Probe Sequence
tttctactcctctgacgaatgggta

SEQ ID NO: 307676 - DNA, 25 bp, Probe Sequence
tatttccatccataaccttgaggct

SEQ ID NO: 307677 - DNA, 25 bp, Probe Sequence
tatataatgcatcaaaagccttaga

SEQ ID NO: 307678 - DNA, 25 bp, Probe Sequence
cagttcttcaaataaggacgcaaat

SEQ ID NO: 307679 - DNA, 25 bp, Probe Sequence
tatatatatatacacacacacacat

SEQ ID NO: 307680 - DNA, 25 bp, Probe Sequence
tattcatatattcaagaccatgtat

SEQ ID NO: 307681 - DNA, 25 bp, Probe Sequence
tatattgcacttcatagacccctag

SEQ ID NO: 307682 - DNA, 25 bp, Probe Sequence
tatagccagctacaagcacaccact

SEQ ID NO: 307683 - DNA, 25 bp, Probe Sequence
tatagccagctacaagcacaccact

SEQ ID NO: 307684 - DNA, 25 bp, Probe Sequence
tatacacgaatagacatcaaactca

SEQ ID NO: 307685 - DNA, 25 bp, Probe Sequence
tataagcgcctacataaacctcacc

SEQ ID NO: 307686 - DNA, 25 bp, Probe Sequence
tattactgccttctgaaacttcctc

SEQ ID NO: 307687 - DNA, 25 bp, Probe Sequence
tattacttttttcaggcttactcta

SEQ ID NO: 307688 - DNA, 25 bp, Probe Sequence
tattacttgttgcaaaggtcttttt

SEQ ID NO: 307689 - DNA, 25 bp, Probe Sequence
tattcgtgtttgcaacggtctttga

SEQ ID NO: 307690 - DNA, 25 bp, Probe Sequence
tttgtattttggaacgtgccccaga

SEQ ID NO: 307691 - DNA, 25 bp, Probe Sequence
tatttcatttgtgggccaggcacgg

SEQ ID NO: 307692 - DNA, 25 bp, Probe Sequence
tatttatgctggtggcttccatccg

SEQ ID NO: 307693 - DNA, 25 bp, Probe Sequence
tattgtgtgtcctggcttaacctgc

SEQ ID NO: 307694 - DNA, 25 bp, Probe Sequence
tttggagactgctcgggaagctgtg

SEQ ID NO: 307695 - DNA, 25 bp, Probe Sequence
tttggaacgctgggtggattgcttg

SEQ ID NO: 307696 - DNA, 25 bp, Probe Sequence
tttgaaaaagctgggaattgctgtc

SEQ ID NO: 307697 - DNA, 25 bp, Probe Sequence
tattgaaaccactgcggttcattca

SEQ ID NO: 307698 - DNA, 25 bp, Probe Sequence
tttctactccactgcagatgaccaa

SEQ ID NO: 307699 - DNA, 25 bp, Probe Sequence
tttctactccactgcagatgaccaa

SEQ ID NO: 307700 - DNA, 25 bp, Probe Sequence
tttctactccactgcagatgaccaa

SEQ ID NO: 307701 - DNA, 25 bp, Probe Sequence
tttactacacaaggcatgaggtcaa

SEQ ID NO: 307702 - DNA, 25 bp, Probe Sequence
tattactaaccaagctgcgaaaatg

SEQ ID NO: 307703 - DNA, 25 bp, Probe Sequence
tttgtctagccctgctctagtaatg

SEQ ID NO: 307704 - DNA, 25 bp, Probe Sequence
tatttctaggcctactcaggtaaaa

SEQ ID NO: 307705 - DNA, 25 bp, Probe Sequence
tatacttccgtctcgatgctgttaa

SEQ ID NO: 307706 - DNA, 25 bp, Probe Sequence
tatacttacttctggcataactaaa

SEQ ID NO: 307707 - DNA, 25 bp, Probe Sequence
tattttacagtaaccacaatctaaa

SEQ ID NO: 307708 - DNA, 25 bp, Probe Sequence
tatattttagaatccacaactatca

SEQ ID NO: 307709 - DNA, 25 bp, Probe Sequence
tatattttaatgtaccctggtccac

SEQ ID NO: 307710 - DNA, 25 bp, Probe Sequence
tatagctttttaacccggattactg

SEQ ID NO: 307711 - DNA, 25 bp, Probe Sequence
tatacttttagacccacagtgaaac

SEQ ID NO: 307712 - DNA, 25 bp, Probe Sequence
tatatttctaaaccaacctaacaag

SEQ ID NO: 307713 - DNA, 25 bp, Probe Sequence
tatttcttaagaccaatgctccaat

SEQ ID NO: 307714 - DNA, 25 bp, Probe Sequence
tattctctagacggacactgtccaa

SEQ ID NO: 307715 - DNA, 25 bp, Probe Sequence
tattctttgcacaacaacaacaaca

SEQ ID NO: 307716 - DNA, 25 bp, Probe Sequence
tatttggagatggcacaactagaaa

SEQ ID NO: 307717 - DNA, 25 bp, Probe Sequence
tatttaggtccagcagctacattta

SEQ ID NO: 307718 - DNA, 25 bp, Probe Sequence
tatttagaatgcaaggtggacatct

SEQ ID NO: 307719 - DNA, 25 bp, Probe Sequence
tatattagatcccatgggaggctgc

SEQ ID NO: 307720 - DNA, 25 bp, Probe Sequence
tatactgtgcaggacatggccaggc

SEQ ID NO: 307721 - DNA, 25 bp, Probe Sequence
tatacctagcaccagtgcttggcat

SEQ ID NO: 307722 - DNA, 25 bp, Probe Sequence
tataaatggcacctatactggcttt

SEQ ID NO: 307723 - DNA, 25 bp, Probe Sequence
tatttatagcacgttacagttgttg

SEQ ID NO: 307724 - DNA, 25 bp, Probe Sequence
tttgtgttcagcctatacttttcca

SEQ ID NO: 307725 - DNA, 25 bp, Probe Sequence
tttgttcccgcaatcactgatttga

SEQ ID NO: 307726 - DNA, 25 bp, Probe Sequence
tatttttgcctgttagtgattgttt

SEQ ID NO: 307727 - DNA, 25 bp, Probe Sequence
tatttttttcagaacaagtgatgtt

SEQ ID NO: 307728 - DNA, 25 bp, Probe Sequence
tatttttattaccaagcgcttcttt

SEQ ID NO: 307729 - DNA, 25 bp, Probe Sequence
tattttgctttagcatccttactct

SEQ ID NO: 307730 - DNA, 25 bp, Probe Sequence
tatttgtgtcataagacatcttcaa

SEQ ID NO: 307731 - DNA, 25 bp, Probe Sequence
tttgctatgtctacgaacgcctcaa

SEQ ID NO: 307732 - DNA, 25 bp, Probe Sequence
tatttgttctgcatgacaccccaaa

SEQ ID NO: 307733 - DNA, 25 bp, Probe Sequence
tatttgtgaggcatgatgggtccaa

SEQ ID NO: 307734 - DNA, 25 bp, Probe Sequence
tatttgtgataggggtggtgaagaa

SEQ ID NO: 307735 - DNA, 25 bp, Probe Sequence
tattctgatgtatgggtgctaaaaa

SEQ ID NO: 307736 - DNA, 25 bp, Probe Sequence
tatattctgatgtatgggtgctaaa

SEQ ID NO: 307737 - DNA, 25 bp, Probe Sequence
tatttctagagctgagtctcagagc

SEQ ID NO: 307738 - DNA, 25 bp, Probe Sequence
tatttctttgcactgaggccttgct

SEQ ID NO: 307739 - DNA, 25 bp, Probe Sequence
tatttgtatctctgaagcatgtttc

SEQ ID NO: 307740 - DNA, 25 bp, Probe Sequence
tatatctatacctagcaccagtgct

SEQ ID NO: 307741 - DNA, 25 bp, Probe Sequence
tatacaaatcactatcgctctatct

SEQ ID NO: 307742 - DNA, 25 bp, Probe Sequence
tatatcacacatattcgctctcatt

SEQ ID NO: 307743 - DNA, 25 bp, Probe Sequence
tatacacatcataatctctgtcaaa

SEQ ID NO: 307744 - DNA, 25 bp, Probe Sequence
tataaccatcattctgattaataaa

SEQ ID NO: 307745 - DNA, 25 bp, Probe Sequence
tatttcacaatgtcgtgctaaataa

SEQ ID NO: 307746 - DNA, 25 bp, Probe Sequence
tttgtcaacttcctgattatgtaac

SEQ ID NO: 307747 - DNA, 25 bp, Probe Sequence
tttgtaacctaacctattgacctgc

SEQ ID NO: 307748 - DNA, 25 bp, Probe Sequence
tttgtaatcctatgcattttacgca

SEQ ID NO: 307749 - DNA, 25 bp, Probe Sequence
tattttattatgttgtctttatcga

SEQ ID NO: 307750 - DNA, 25 bp, Probe Sequence
tatttccaaatcttactttgtcata

SEQ ID NO: 307751 - DNA, 25 bp, Probe Sequence
tatttccacatttttgtgcttggat

SEQ ID NO: 307752 - DNA, 25 bp, Probe Sequence
tattctgcctaacgtttgcttctgt

SEQ ID NO: 307753 - DNA, 25 bp, Probe Sequence
tattttctaatcgtggtgtgtctat

SEQ ID NO: 307754 - DNA, 25 bp, Probe Sequence
tattttctttccttatgtactgtac

SEQ ID NO: 307755 - DNA, 25 bp, Probe Sequence
tattttctttccttatgtactgtac

SEQ ID NO: 307756 - DNA, 25 bp, Probe Sequence
tattttctttccttatgtactgtac

SEQ ID NO: 307757 - DNA, 25 bp, Probe Sequence
tattttctttccttatgtactgtac

SEQ ID NO: 307758 - DNA, 25 bp, Probe Sequence
tattttcttattctggtataccaca

SEQ ID NO: 307759 - DNA, 25 bp, Probe Sequence
tattttctctctttgctggtattca

SEQ ID NO: 307760 - DNA, 25 bp, Probe Sequence
tattttcccatatttcaggtgaata

SEQ ID NO: 307761 - DNA, 25 bp, Probe Sequence
tattttcacctctttagaagaaata

SEQ ID NO: 307762 - DNA, 25 bp, Probe Sequence
tattactgcctttctaatgaaacaa

SEQ ID NO: 307763 - DNA, 25 bp, Probe Sequence
tatttctccaatgtacaataaaaga

SEQ ID NO: 307764 - DNA, 25 bp, Probe Sequence
tatttaccaactttgcaataacaga

SEQ ID NO: 307765 - DNA, 25 bp, Probe Sequence
tatagtacccacacatgcaaaataa

SEQ ID NO: 307766 - DNA, 25 bp, Probe Sequence
tatattcccaacaacattaaaaaat

SEQ ID NO: 307767 - DNA, 25 bp, Probe Sequence
tatacttcaaacactgatcacggga

SEQ ID NO: 307768 - DNA, 25 bp, Probe Sequence
ttcacttaacagctcttttgggatt

SEQ ID NO: 307769 - DNA, 25 bp, Probe Sequence
tatagcttaaagttgctcttttggt

SEQ ID NO: 307770 - DNA, 25 bp, Probe Sequence
tatagttaagatgtcagttcttgcc

SEQ ID NO: 307771 - DNA, 25 bp, Probe Sequence
tattttgacaggttcgatcctctcc

SEQ ID NO: 307772 - DNA, 25 bp, Probe Sequence
tatagatccacatgaacgcacgcct

SEQ ID NO: 307773 - DNA, 25 bp, Probe Sequence
tatattcacacacgtatgcgggcga

SEQ ID NO: 307774 - DNA, 25 bp, Probe Sequence
tatatgaccacgctcacccgcatga

SEQ ID NO: 307775 - DNA, 25 bp, Probe Sequence
tatataccaggcttgctctttgcag

SEQ ID NO: 307776 - DNA, 25 bp, Probe Sequence
tattctgtcgagcagtctttcctca

SEQ ID NO: 307777 - DNA, 25 bp, Probe Sequence
tatattttagagctttcagcagcct

SEQ ID NO: 307778 - DNA, 25 bp, Probe Sequence
tatttctgttggttagtagacacta

SEQ ID NO: 307779 - DNA, 25 bp, Probe Sequence
tatattctgtttccaagtaaccttt

SEQ ID NO: 307780 - DNA, 25 bp, Probe Sequence
tatatactatttcccttgaaatttt

SEQ ID NO: 307781 - DNA, 25 bp, Probe Sequence
tttgttaatataccccaaattgtgt

SEQ ID NO: 307782 - DNA, 25 bp, Probe Sequence
tttctgtccaagtaccctaataggg

SEQ ID NO: 307783 - DNA, 25 bp, Probe Sequence
tttggcttccagtccccaaagaagg

SEQ ID NO: 307784 - DNA, 25 bp, Probe Sequence
tttggctgtacgttcctaggatcgg

SEQ ID NO: 307785 - DNA, 25 bp, Probe Sequence
tattggagtagcctccctaggcagt

SEQ ID NO: 307786 - DNA, 25 bp, Probe Sequence
tttatggtcagccccagttgatgct

SEQ ID NO: 307787 - DNA, 25 bp, Probe Sequence
ttttggccaggtggaatatgaccca

SEQ ID NO: 307788 - DNA, 25 bp, Probe Sequence
ttctgggcaaggtcgtcgaccccac

SEQ ID NO: 307789 - DNA, 25 bp, Probe Sequence
tttgggcacagccctaaaggccaac

SEQ ID NO: 307790 - DNA, 25 bp, Probe Sequence
ttttggtcaccaatgagtacccgac

SEQ ID NO: 307791 - DNA, 25 bp, Probe Sequence
tttggatgtccacagagtaccctcc

SEQ ID NO: 307792 - DNA, 25 bp, Probe Sequence
tattggtttgcacaagttccctgga

SEQ ID NO: 307793 - DNA, 25 bp, Probe Sequence
tattttttattttttcgcatcagta

SEQ ID NO: 307794 - DNA, 25 bp, Probe Sequence
tatactttatatacttttctccagt

SEQ ID NO: 307795 - DNA, 25 bp, Probe Sequence
tatagtcctataagcttttccactt

SEQ ID NO: 307796 - DNA, 25 bp, Probe Sequence
tatagagctgtatagagtttaattt

SEQ ID NO: 307797 - DNA, 25 bp, Probe Sequence
tataggcactcatcaagttctcaag

SEQ ID NO: 307798 - DNA, 25 bp, Probe Sequence
tattcacacatctcaaagtccacca

SEQ ID NO: 307799 - DNA, 25 bp, Probe Sequence
tattaccagctcatgaagacagccc

SEQ ID NO: 307800 - DNA, 25 bp, Probe Sequence
tatatggctctctgttagccagccc

SEQ ID NO: 307801 - DNA, 25 bp, Probe Sequence
tttgagcaacttctatgcacagtac

SEQ ID NO: 307802 - DNA, 25 bp, Probe Sequence
tattcctacattccaggccagaacc

SEQ ID NO: 307803 - DNA, 25 bp, Probe Sequence
tattccttttcaggcctgcagagtg

SEQ ID NO: 307804 - DNA, 25 bp, Probe Sequence
tatatacttatatcacgtaggatgt

SEQ ID NO: 307805 - DNA, 25 bp, Probe Sequence
tatatacttctatttgtgggtactt

SEQ ID NO: 307806 - DNA, 25 bp, Probe Sequence
tattcagttctgtacatatggggac

SEQ ID NO: 307807 - DNA, 25 bp, Probe Sequence
tatttctctgcttcactctggagga

SEQ ID NO: 307808 - DNA, 25 bp, Probe Sequence
tatttctcaacatgcctggagatgc

SEQ ID NO: 307809 - DNA, 25 bp, Probe Sequence
tattgagtaccaagccatgtaatgg

SEQ ID NO: 307810 - DNA, 25 bp, Probe Sequence
tatttcttccaaccttgcaaggacc

SEQ ID NO: 307811 - DNA, 25 bp, Probe Sequence
tatttcttccaaccttgcaaggacc

SEQ ID NO: 307812 - DNA, 25 bp, Probe Sequence
tatttttacaagcttacaggtaggt

SEQ ID NO: 307813 - DNA, 25 bp, Probe Sequence
tatttcttacaatcgtactgtgata

SEQ ID NO: 307814 - DNA, 25 bp, Probe Sequence
tattatcattccttactaccctgaa

SEQ ID NO: 307815 - DNA, 25 bp, Probe Sequence
tattttgtacttaatacctgtaaag

SEQ ID NO: 307816 - DNA, 25 bp, Probe Sequence
tatattttcagtttttccataaagg

SEQ ID NO: 307817 - DNA, 25 bp, Probe Sequence
tattactttcttcctccaaacaagt

SEQ ID NO: 307818 - DNA, 25 bp, Probe Sequence
tatacactgttttttccatatatat

SEQ ID NO: 307819 - DNA, 25 bp, Probe Sequence
tatacctgaattttattcaataaca

SEQ ID NO: 307820 - DNA, 25 bp, Probe Sequence
ttacctaatttctattatgggactg

SEQ ID NO: 307821 - DNA, 25 bp, Probe Sequence
tttccccttccattttgaggagctg

SEQ ID NO: 307822 - DNA, 25 bp, Probe Sequence
tttccttttggctttcgagggcctg

SEQ ID NO: 307823 - DNA, 25 bp, Probe Sequence
tattcttatgtgtgctttaagggct

SEQ ID NO: 307824 - DNA, 25 bp, Probe Sequence
tttgatgtatatgtccttgaagggc

SEQ ID NO: 307825 - DNA, 25 bp, Probe Sequence
tttgtatttctgatcgtaagggctg

SEQ ID NO: 307826 - DNA, 25 bp, Probe Sequence
tttctggttaaaggtatagtggatg

SEQ ID NO: 307827 - DNA, 25 bp, Probe Sequence
tttggagttaaaatgttagtctaca

SEQ ID NO: 307828 - DNA, 25 bp, Probe Sequence
tttgtgtgaaaatctcttttctaca

SEQ ID NO: 307829 - DNA, 25 bp, Probe Sequence
tatttgtggtgaatgtgttttttaa

SEQ ID NO: 307830 - DNA, 25 bp, Probe Sequence
tatatattggagaagttgttttagc

SEQ ID NO: 307831 - DNA, 25 bp, Probe Sequence
tatagctcagccaaatcttgtttta

SEQ ID NO: 307832 - DNA, 25 bp, Probe Sequence
tatatgtagcctttactgtttgata

SEQ ID NO: 307833 - DNA, 25 bp, Probe Sequence
tatatgaaggaccttatttggcata

SEQ ID NO: 307834 - DNA, 25 bp, Probe Sequence
tattgcaaggaccttctttgctgcc

SEQ ID NO: 307835 - DNA, 25 bp, Probe Sequence
tatttattccagacctttctgccac

SEQ ID NO: 307836 - DNA, 25 bp, Probe Sequence
tatattgggccatccttctaccaaa

SEQ ID NO: 307837 - DNA, 25 bp, Probe Sequence
tatttgtgtaaacctagctagtaaa

SEQ ID NO: 307838 - DNA, 25 bp, Probe Sequence
tttctgcctaatagtaactggttaa

SEQ ID NO: 307839 - DNA, 25 bp, Probe Sequence
tattctgcagctattaaaggagtta

SEQ ID NO: 307840 - DNA, 25 bp, Probe Sequence
tatagctcctgttataatagcaagt

SEQ ID NO: 307841 - DNA, 25 bp, Probe Sequence
tataccagcgttatgagatcaagat

SEQ ID NO: 307842 - DNA, 25 bp, Probe Sequence
tataccagcgttatgagatcaagat

SEQ ID NO: 307843 - DNA, 25 bp, Probe Sequence
tatatgccgctgctttgaaagagaa

SEQ ID NO: 307844 - DNA, 25 bp, Probe Sequence
tatatccttgcgatgtacagaatca

SEQ ID NO: 307845 - DNA, 25 bp, Probe Sequence
tatatctctccagctgtactgtagt

SEQ ID NO: 307846 - DNA, 25 bp, Probe Sequence
tatatctgctgtcatcttagttgga

SEQ ID NO: 307847 - DNA, 25 bp, Probe Sequence
tattgcggtcaagtctcattctgct

SEQ ID NO: 307848 - DNA, 25 bp, Probe Sequence
tattttgtcatgcttatctcctgtc

SEQ ID NO: 307849 - DNA, 25 bp, Probe Sequence
tatttctgtatgtctccatctattg

SEQ ID NO: 307850 - DNA, 25 bp, Probe Sequence
tatttgtggtccccattttgggtgg

SEQ ID NO: 307851 - DNA, 25 bp, Probe Sequence
tattattggagcctaattgttaggt

SEQ ID NO: 307852 - DNA, 25 bp, Probe Sequence
tattccaggcagctcaatgattatc

SEQ ID NO: 307853 - DNA, 25 bp, Probe Sequence
ttacgaaggttcaagattatctaag

SEQ ID NO: 307854 - DNA, 25 bp, Probe Sequence
tatagcaagagtcaaagttttaaga

SEQ ID NO: 307855 - DNA, 25 bp, Probe Sequence
tattcaaggttgatgacttttagga

SEQ ID NO: 307856 - DNA, 25 bp, Probe Sequence
tattactgccttggtagcatttatt

SEQ ID NO: 307857 - DNA, 25 bp, Probe Sequence
tatttcatacattctcatacattta

SEQ ID NO: 307858 - DNA, 25 bp, Probe Sequence
tatattatcatttctgtgccttcta

SEQ ID NO: 307859 - DNA, 25 bp, Probe Sequence
tatattgtgtttgctgacaatcaaa

SEQ ID NO: 307860 - DNA, 25 bp, Probe Sequence
tatttggtcttcaataatgctaaat

SEQ ID NO: 307861 - DNA, 25 bp, Probe Sequence
tatttgagttctatttccagacttg

SEQ ID NO: 307862 - DNA, 25 bp, Probe Sequence
tattggttttttctagggcttgtat

SEQ ID NO: 307863 - DNA, 25 bp, Probe Sequence
tttggcatttgtttgttgcgggtgg

SEQ ID NO: 307864 - DNA, 25 bp, Probe Sequence
tttggattatctgctattcgggtaa

SEQ ID NO: 307865 - DNA, 25 bp, Probe Sequence
tatatagttagctcttacagtttag

SEQ ID NO: 307866 - DNA, 25 bp, Probe Sequence
tattactccagtgcttcatagtcct

SEQ ID NO: 307867 - DNA, 25 bp, Probe Sequence
tatagatgtccactacttctattca

SEQ ID NO: 307868 - DNA, 25 bp, Probe Sequence
tatagactccactgtgctttgtgtc

SEQ ID NO: 307869 - DNA, 25 bp, Probe Sequence
tatagtcccagctagttgggaggct

SEQ ID NO: 307870 - DNA, 25 bp, Probe Sequence
tatagtgcaacctatttgggtaaag

SEQ ID NO: 307871 - DNA, 25 bp, Probe Sequence
tatatgctcatatactttctagtta

SEQ ID NO: 307872 - DNA, 25 bp, Probe Sequence
tatatgctgcactaacctttggtat

SEQ ID NO: 307873 - DNA, 25 bp, Probe Sequence
tatatgctgcattgagacttacggc

SEQ ID NO: 307874 - DNA, 25 bp, Probe Sequence
tattgatgatattaatgtcactggg

SEQ ID NO: 307875 - DNA, 25 bp, Probe Sequence
tatagaatatgggatcccgtgtgtg

SEQ ID NO: 307876 - DNA, 25 bp, Probe Sequence
tttgtcattggcgtgcacacgtgtg

SEQ ID NO: 307877 - DNA, 25 bp, Probe Sequence
tattgccaaggggctcaggctgtgc

SEQ ID NO: 307878 - DNA, 25 bp, Probe Sequence
tttgtcaaggggatggtggcaaact

SEQ ID NO: 307879 - DNA, 25 bp, Probe Sequence
tatttcaagtggtttagttgctaga

SEQ ID NO: 307880 - DNA, 25 bp, Probe Sequence
tatttctagtagttacagcttggaa

SEQ ID NO: 307881 - DNA, 25 bp, Probe Sequence
tattttgagtaggtcacccctgata

SEQ ID NO: 307882 - DNA, 25 bp, Probe Sequence
tatttaatgtagtttaccttgattt

SEQ ID NO: 307883 - DNA, 25 bp, Probe Sequence
tatttgaacaagttttcctttattg

SEQ ID NO: 307884 - DNA, 25 bp, Probe Sequence
tatattacctagttattctttcaaa

SEQ ID NO: 307885 - DNA, 25 bp, Probe Sequence
tatatatacccacccaatcttgatc

SEQ ID NO: 307886 - DNA, 25 bp, Probe Sequence
tatataactccaccaaactaaacta

SEQ ID NO: 307887 - DNA, 25 bp, Probe Sequence
tttaaccattaaaactgaagtctga

SEQ ID NO: 307888 - DNA, 25 bp, Probe Sequence
tttaaccattaaaactgaagtctga

SEQ ID NO: 307889 - DNA, 25 bp, Probe Sequence
tttacattttcctgtctgaagtcta

SEQ ID NO: 307890 - DNA, 25 bp, Probe Sequence
tttacatttttctgatgggttcatg

SEQ ID NO: 307891 - DNA, 25 bp, Probe Sequence
tttgtatttaattctgcaggtgttc

SEQ ID NO: 307892 - DNA, 25 bp, Probe Sequence
tttgttgggaatttgcctgttacat

SEQ ID NO: 307893 - DNA, 25 bp, Probe Sequence
tattgttggtaatagtgctttatat

SEQ ID NO: 307894 - DNA, 25 bp, Probe Sequence
tattattggtctttggtggtgtaca

SEQ ID NO: 307895 - DNA, 25 bp, Probe Sequence
tattttggctcttcagactgggtta

SEQ ID NO: 307896 - DNA, 25 bp, Probe Sequence
tatttaagtctgtacatcttggtta

SEQ ID NO: 307897 - DNA, 25 bp, Probe Sequence
tatttacttcaaaactagagttcca

SEQ ID NO: 307898 - DNA, 25 bp, Probe Sequence
tatttatttcaagaccctgctttca

SEQ ID NO: 307899 - DNA, 25 bp, Probe Sequence
tatttcattttagacatgccttcta

SEQ ID NO: 307900 - DNA, 25 bp, Probe Sequence
tatttgattttaggagagtgtttaa

SEQ ID NO: 307901 - DNA, 25 bp, Probe Sequence
tatttgcaggtttgtgaagttcttg

SEQ ID NO: 307902 - DNA, 25 bp, Probe Sequence
tattctgcctgtgactcaatttcct

SEQ ID NO: 307903 - DNA, 25 bp, Probe Sequence
tatagcttcattgcaggactttact

SEQ ID NO: 307904 - DNA, 25 bp, Probe Sequence
tatagacttcccagcagcatttcac

SEQ ID NO: 307905 - DNA, 25 bp, Probe Sequence
tatatacttccgaggcacctgcatt

SEQ ID NO: 307906 - DNA, 25 bp, Probe Sequence
tatatccccacgaaggccttcatta

SEQ ID NO: 307907 - DNA, 25 bp, Probe Sequence
tattatcccagcccaggagttctgt

SEQ ID NO: 307908 - DNA, 25 bp, Probe Sequence
tattaccaactccttgtgatatctt

SEQ ID NO: 307909 - DNA, 25 bp, Probe Sequence
tattaaaaccctttatattcatctt

SEQ ID NO: 307910 - DNA, 25 bp, Probe Sequence
tattaaaacctctgattatggactt

SEQ ID NO: 307911 - DNA, 25 bp, Probe Sequence
tattaaaacctagtctattgtagtt

SEQ ID NO: 307912 - DNA, 25 bp, Probe Sequence
tattaagaacacttctacattttta

SEQ ID NO: 307913 - DNA, 25 bp, Probe Sequence
tattctacaactcttacagtttaaa

SEQ ID NO: 307914 - DNA, 25 bp, Probe Sequence
tattctatagttattaagttcttta

SEQ ID NO: 307915 - DNA, 25 bp, Probe Sequence
tattctttatctattcaatggtctt

SEQ ID NO: 307916 - DNA, 25 bp, Probe Sequence
tatttgtccttttattatggtttct

SEQ ID NO: 307917 - DNA, 25 bp, Probe Sequence
tattggtcctggtgatgcttggtgc

SEQ ID NO: 307918 - DNA, 25 bp, Probe Sequence
tttggctttggggattcacgtggtg

SEQ ID NO: 307919 - DNA, 25 bp, Probe Sequence
tttagcttaagagaacactgttctg

SEQ ID NO: 307920 - DNA, 25 bp, Probe Sequence
tattacctaatggagatccatctgt

SEQ ID NO: 307921 - DNA, 25 bp, Probe Sequence
tattactctcagtctgagacccagt

SEQ ID NO: 307922 - DNA, 25 bp, Probe Sequence
ttaccctgcagggagccaaaggccc

SEQ ID NO: 307923 - DNA, 25 bp, Probe Sequence
ttaccctagggataacagcgcaatc

SEQ ID NO: 307924 - DNA, 25 bp, Probe Sequence
tttcccaagagctcaaaacactaca

SEQ ID NO: 307925 - DNA, 25 bp, Probe Sequence
tatttgcgggactcaaaaatgctga

SEQ ID NO: 307926 - DNA, 25 bp, Probe Sequence
tattctgggtcatctatagaagtta

SEQ ID NO: 307927 - DNA, 25 bp, Probe Sequence
tatttgaggccatgcttaatatatt

SEQ ID NO: 307928 - DNA, 25 bp, Probe Sequence
tatttcggcccgtatcgaacttttg

SEQ ID NO: 307929 - DNA, 25 bp, Probe Sequence
tatttcaatcccttactaattttct

SEQ ID NO: 307930 - DNA, 25 bp, Probe Sequence
tattttctcccagtaaagcttttct

SEQ ID NO: 307931 - DNA, 25 bp, Probe Sequence
tattaaccacacttaaacttagagt

SEQ ID NO: 307932 - DNA, 25 bp, Probe Sequence
tattaaccagactcagaaagaaaac

SEQ ID NO: 307933 - DNA, 25 bp, Probe Sequence
ttctaacctgaatcggaggacaacc

SEQ ID NO: 307934 - DNA, 25 bp, Probe Sequence
tattgaaatcgttgaagcgagagaa

SEQ ID NO: 307935 - DNA, 25 bp, Probe Sequence
tattgactgatgtttggacggtgaa

SEQ ID NO: 307936 - DNA, 25 bp, Probe Sequence
tatataatgcatgtattcactaaaa

SEQ ID NO: 307937 - DNA, 25 bp, Probe Sequence
tatagcaaatataattcccataaaa

SEQ ID NO: 307938 - DNA, 25 bp, Probe Sequence
tattaagttgtttccaatacaataa

SEQ ID NO: 307939 - DNA, 25 bp, Probe Sequence
tattccatttgtacctaagagaaaa

SEQ ID NO: 307940 - DNA, 25 bp, Probe Sequence
tatttaggtgacactatagaacaag

SEQ ID NO: 307941 - DNA, 25 bp, Probe Sequence
tatattatggtgacacctatatgaa

SEQ ID NO: 307942 - DNA, 25 bp, Probe Sequence
tatttgacttgcacctataaaatta

SEQ ID NO: 307943 - DNA, 25 bp, Probe Sequence
tatttactcatgtgccttcaatttt

SEQ ID NO: 307944 - DNA, 25 bp, Probe Sequence
tttaacctattggcctcaaaaatat

SEQ ID NO: 307945 - DNA, 25 bp, Probe Sequence
tttggcccagttgctctaacgaaag

SEQ ID NO: 307946 - DNA, 25 bp, Probe Sequence
tttggccaagttacagtcaatgggc

SEQ ID NO: 307947 - DNA, 25 bp, Probe Sequence
ttggccaagttacagtcaatgggcc

SEQ ID NO: 307948 - DNA, 25 bp, Probe Sequence
ttaggggctacagagtcgagggacg

SEQ ID NO: 307949 - DNA, 25 bp, Probe Sequence
ttggggcctaggaaccgagggcaca

SEQ ID NO: 307950 - DNA, 25 bp, Probe Sequence
ttgtgggccatttaattcagggccc

SEQ ID NO: 307951 - DNA, 25 bp, Probe Sequence
tattggagcctaattgttaggtagc

SEQ ID NO: 307952 - DNA, 25 bp, Probe Sequence
tatttgaccatgacattttggagaa

SEQ ID NO: 307953 - DNA, 25 bp, Probe Sequence
tatttgtattgcaattttggatgat

SEQ ID NO: 307954 - DNA, 25 bp, Probe Sequence
tatattgtcataccatagtaggaag

SEQ ID NO: 307955 - DNA, 25 bp, Probe Sequence
tatatagtcaagtaggagcagtgga

SEQ ID NO: 307956 - DNA, 25 bp, Probe Sequence
ttatcatgttggtggaggtggccgc

SEQ ID NO: 307957 - DNA, 25 bp, Probe Sequence
tatttttggctgggtgtggtggctc

SEQ ID NO: 307958 - DNA, 25 bp, Probe Sequence
tatttttgaggtgttcctggtcttt

SEQ ID NO: 307959 - DNA, 25 bp, Probe Sequence
tattttgtggtcctttcctgggatt

SEQ ID NO: 307960 - DNA, 25 bp, Probe Sequence
tattttatgtcccttatcactgtgc

SEQ ID NO: 307961 - DNA, 25 bp, Probe Sequence
tatattatttcctctgcataattga

SEQ ID NO: 307962 - DNA, 25 bp, Probe Sequence
tatttgctttcactactaaactgca

SEQ ID NO: 307963 - DNA, 25 bp, Probe Sequence
tatttcgtcactgtcgcaaacagca

SEQ ID NO: 307964 - DNA, 25 bp, Probe Sequence
tattcgagaacccatagccaataga

SEQ ID NO: 307965 - DNA, 25 bp, Probe Sequence
tattcacgtacagcaagccaacttc

SEQ ID NO: 307966 - DNA, 25 bp, Probe Sequence
tattcacaattctgcggtaccttat

SEQ ID NO: 307967 - DNA, 25 bp, Probe Sequence
tattcagcattatagggaagtctta

SEQ ID NO: 307968 - DNA, 25 bp, Probe Sequence
tttcaatttataacgttctcagtcc

SEQ ID NO: 307969 - DNA, 25 bp, Probe Sequence
tttctgtttaaccctttcaggactg

SEQ ID NO: 307970 - DNA, 25 bp, Probe Sequence
tattctgtttaggcccactaaggca

SEQ ID NO: 307971 - DNA, 25 bp, Probe Sequence
tatattgtttcatcccatgtacaaa

SEQ ID NO: 307972 - DNA, 25 bp, Probe Sequence
tatattgtttaccttcaaagataca

SEQ ID NO: 307973 - DNA, 25 bp, Probe Sequence
tttcgacctaccatagaagaccccg

SEQ ID NO: 307974 - DNA, 25 bp, Probe Sequence
ttccgaaccctcatagcggcaatcc

SEQ ID NO: 307975 - DNA, 25 bp, Probe Sequence
ttccgaaccctcatagcggcaatcc

SEQ ID NO: 307976 - DNA, 25 bp, Probe Sequence
tattcgaactctgcggcagcggcaa

SEQ ID NO: 307977 - DNA, 25 bp, Probe Sequence
tataggaatcattctcagccaccgc

SEQ ID NO: 307978 - DNA, 25 bp, Probe Sequence
tataggtatttgtaaccctgcccac

SEQ ID NO: 307979 - DNA, 25 bp, Probe Sequence
tatagagtttatctacacggccccc

SEQ ID NO: 307980 - DNA, 25 bp, Probe Sequence
tttggttttagtccacatggcctcc

SEQ ID NO: 307981 - DNA, 25 bp, Probe Sequence
ttaggtatcctaggtaagagcccct

SEQ ID NO: 307982 - DNA, 25 bp, Probe Sequence
ttaggtatcctaggtaagagcccct

SEQ ID NO: 307983 - DNA, 25 bp, Probe Sequence
tatagtcctccttggaaaggccctt

SEQ ID NO: 307984 - DNA, 25 bp, Probe Sequence
tattcttcctcttgggaacatccct

SEQ ID NO: 307985 - DNA, 25 bp, Probe Sequence
tattttacctatcagagacatctat

SEQ ID NO: 307986 - DNA, 25 bp, Probe Sequence
tatttatactataccaaactcattt

SEQ ID NO: 307987 - DNA, 25 bp, Probe Sequence
tatttcatacataaccacacccttc

SEQ ID NO: 307988 - DNA, 25 bp, Probe Sequence
tatttacgtaaactgcccacttgca

SEQ ID NO: 307989 - DNA, 25 bp, Probe Sequence
tatttacggtaactgcccaactggc

SEQ ID NO: 307990 - DNA, 25 bp, Probe Sequence
tatttattgggaacccctgcagggc

SEQ ID NO: 307991 - DNA, 25 bp, Probe Sequence
tattatatttggaggcagcttcaga

SEQ ID NO: 307992 - DNA, 25 bp, Probe Sequence
tatttattgcggggagacagctctc

SEQ ID NO: 307993 - DNA, 25 bp, Probe Sequence
tatttttcgtgatggagatgtcctt

SEQ ID NO: 307994 - DNA, 25 bp, Probe Sequence
tatatggctatcatgactaagtgct

SEQ ID NO: 307995 - DNA, 25 bp, Probe Sequence
tatatccttcttgctcatcagttga

SEQ ID NO: 307996 - DNA, 25 bp, Probe Sequence
tattatttgcttggctatcttggac

SEQ ID NO: 307997 - DNA, 25 bp, Probe Sequence
tatttcttcctctaatcttggcaaa

SEQ ID NO: 307998 - DNA, 25 bp, Probe Sequence
tatttattcctccaatttcaataaa

SEQ ID NO: 307999 - DNA, 25 bp, Probe Sequence
tatattttcaccccttggaataact

SEQ ID NO: 308000 - DNA, 25 bp, Probe Sequence
tatttctacacctacttggatatac

SEQ ID NO: 308001 - DNA, 25 bp, Probe Sequence
tatttcatacatggcactttggcat

SEQ ID NO: 308002 - DNA, 25 bp, Probe Sequence
tatttctactgatctgatctcactg

SEQ ID NO: 308003 - DNA, 25 bp, Probe Sequence
tattcgctgcactaactgtgcccga

SEQ ID NO: 308004 - DNA, 25 bp, Probe Sequence
tattcctgccaccactgggcaaaca

SEQ ID NO: 308005 - DNA, 25 bp, Probe Sequence
tattccctctcgatgctgagcgaaa

SEQ ID NO: 308006 - DNA, 25 bp, Probe Sequence
ttaggccatccgtgtgcagggaggc

SEQ ID NO: 308007 - DNA, 25 bp, Probe Sequence
tttggctcccgctttggggagcgcc

SEQ ID NO: 308008 - DNA, 25 bp, Probe Sequence
tttggctcccgctttggggagcgcc

SEQ ID NO: 308009 - DNA, 25 bp, Probe Sequence
tttgcgcacccactcgatgggtagg

SEQ ID NO: 308010 - DNA, 25 bp, Probe Sequence
tttggcaccgagagatcgtacggga

SEQ ID NO: 308011 - DNA, 25 bp, Probe Sequence
tttgggtccctttcttacagatgga

SEQ ID NO: 308012 - DNA, 25 bp, Probe Sequence
tttggtttaatatcctgtaaggcac

SEQ ID NO: 308013 - DNA, 25 bp, Probe Sequence
tttggtggcaaatactttaggagca

SEQ ID NO: 308014 - DNA, 25 bp, Probe Sequence
tttggggcttactattcaaaagaga

SEQ ID NO: 308015 - DNA, 25 bp, Probe Sequence
tatatagccctttatttaaaagaga

SEQ ID NO: 308016 - DNA, 25 bp, Probe Sequence
tatatggctttttttcttcgacaaa

SEQ ID NO: 308017 - DNA, 25 bp, Probe Sequence
tttggtgtttcacttcatgctctga

SEQ ID NO: 308018 - DNA, 25 bp, Probe Sequence
tataggtcatgttccatatatgtta

SEQ ID NO: 308019 - DNA, 25 bp, Probe Sequence
tatttgtatgtgtcactagtgtcta

SEQ ID NO: 308020 - DNA, 25 bp, Probe Sequence
tatttgcttggctatcttggacata

SEQ ID NO: 308021 - DNA, 25 bp, Probe Sequence
tataggcttgccttgctgagagcca

SEQ ID NO: 308022 - DNA, 25 bp, Probe Sequence
tattcagtgtggctgctgaggccaa

SEQ ID NO: 308023 - DNA, 25 bp, Probe Sequence
tattcggcgcatgagctggagtcct

SEQ ID NO: 308024 - DNA, 25 bp, Probe Sequence
tatttgcatcctgactaggctgccc

SEQ ID NO: 308025 - DNA, 25 bp, Probe Sequence
tatatctcttctgtcttgaagaccc

SEQ ID NO: 308026 - DNA, 25 bp, Probe Sequence
tatatcttatgatttcttaatgtaa

SEQ ID NO: 308027 - DNA, 25 bp, Probe Sequence
tatattgatgtgactttctgacact

SEQ ID NO: 308028 - DNA, 25 bp, Probe Sequence
tattatttaccaatgctgcatcatc

SEQ ID NO: 308029 - DNA, 25 bp, Probe Sequence
tatatttctactgatctgatctcac

SEQ ID NO: 308030 - DNA, 25 bp, Probe Sequence
tatatctgtgtaagacacgtgcaac

SEQ ID NO: 308031 - DNA, 25 bp, Probe Sequence
tatattgtgtcaggctgtcttgaac

SEQ ID NO: 308032 - DNA, 25 bp, Probe Sequence
tatatgtggcttcctctgatgctga

SEQ ID NO: 308033 - DNA, 25 bp, Probe Sequence
tatatgtggcttcctctgatgctga

SEQ ID NO: 308034 - DNA, 25 bp, Probe Sequence
tatatgtggcttcctctgatgctga

SEQ ID NO: 308035 - DNA, 25 bp, Probe Sequence
tatatgtggcttcctctgatgctga

SEQ ID NO: 308036 - DNA, 25 bp, Probe Sequence
tatatatcgcttttctctgcagcac

SEQ ID NO: 308037 - DNA, 25 bp, Probe Sequence
tatatatcgcttttctctgcagcac

SEQ ID NO: 308038 - DNA, 25 bp, Probe Sequence
tatattatcatctctctctatcaca

SEQ ID NO: 308039 - DNA, 25 bp, Probe Sequence
tattcattacttcatctgtatcaag

SEQ ID NO: 308040 - DNA, 25 bp, Probe Sequence
tattcttgacgttgacttcattaaa

SEQ ID NO: 308041 - DNA, 25 bp, Probe Sequence
tattcaagcactccagacttgatta

SEQ ID NO: 308042 - DNA, 25 bp, Probe Sequence
tattatcatgactgtgacctcacta

SEQ ID NO: 308043 - DNA, 25 bp, Probe Sequence
tattggctcatctgtgacctacgat

SEQ ID NO: 308044 - DNA, 25 bp, Probe Sequence
tatttgctgacagctgacctttgtc

SEQ ID NO: 308045 - DNA, 25 bp, Probe Sequence
tatatgtgcccatttatctttttct

SEQ ID NO: 308046 - DNA, 25 bp, Probe Sequence
tatattccacacttagcttttttgt

SEQ ID NO: 308047 - DNA, 25 bp, Probe Sequence
tatattcccacctgaagtttttata

SEQ ID NO: 308048 - DNA, 25 bp, Probe Sequence
tatttcctattctgtggtttttcca

SEQ ID NO: 308049 - DNA, 25 bp, Probe Sequence
tatttgcctaccttttgatgttttc

SEQ ID NO: 308050 - DNA, 25 bp, Probe Sequence
tatatatgcactttgctgtttgatt

SEQ ID NO: 308051 - DNA, 25 bp, Probe Sequence
tatatgcactttgctgtttgattaa

SEQ ID NO: 308052 - DNA, 25 bp, Probe Sequence
tattcagctttcatgacgctggtca

SEQ ID NO: 308053 - DNA, 25 bp, Probe Sequence
tattcactgtcgagatggctaatca

SEQ ID NO: 308054 - DNA, 25 bp, Probe Sequence
tatatatttcacagactttatcaat

SEQ ID NO: 308055 - DNA, 25 bp, Probe Sequence
tattttcagcaaaactttccaactg

SEQ ID NO: 308056 - DNA, 25 bp, Probe Sequence
tatttgtcatgctgtagcatttgta

SEQ ID NO: 308057 - DNA, 25 bp, Probe Sequence
tattttcatcggagttaatccaaaa

SEQ ID NO: 308058 - DNA, 25 bp, Probe Sequence
tattttccttttatactacagaaat

SEQ ID NO: 308059 - DNA, 25 bp, Probe Sequence
tattaccccttcatgtcctaaagaa

SEQ ID NO: 308060 - DNA, 25 bp, Probe Sequence
tttagccctcatacttttcctaagt

SEQ ID NO: 308061 - DNA, 25 bp, Probe Sequence
tttggcgtctcgtttttggctaatt

SEQ ID NO: 308062 - DNA, 25 bp, Probe Sequence
tttggggtccttcagaggtcactgt

SEQ ID NO: 308063 - DNA, 25 bp, Probe Sequence
tttgggaggccaagccgggcagatt

SEQ ID NO: 308064 - DNA, 25 bp, Probe Sequence
tttgggggccaacgcgggaagatca

SEQ ID NO: 308065 - DNA, 25 bp, Probe Sequence
tttggatgagtgggcagggggaagc

SEQ ID NO: 308066 - DNA, 25 bp, Probe Sequence
tttggcctgggccagtgagactgaa

SEQ ID NO: 308067 - DNA, 25 bp, Probe Sequence
tattcgctccgacaagatgaaagaa

SEQ ID NO: 308068 - DNA, 25 bp, Probe Sequence
tttcctcggggaagaaaagcattga

SEQ ID NO: 308069 - DNA, 25 bp, Probe Sequence
tttcccacggaacggaattcttcag

SEQ ID NO: 308070 - DNA, 25 bp, Probe Sequence
ttcccaggtgtgccaaggaattaat

SEQ ID NO: 308071 - DNA, 25 bp, Probe Sequence
ttcccgggatcttaacatcaggaat

SEQ ID NO: 308072 - DNA, 25 bp, Probe Sequence
tttcctgggattcaaacctgcatat

SEQ ID NO: 308073 - DNA, 25 bp, Probe Sequence
ttttccttggtgcgacactgtgcat

SEQ ID NO: 308074 - DNA, 25 bp, Probe Sequence
tttgttttgagccctaagcatgtgt

SEQ ID NO: 308075 - DNA, 25 bp, Probe Sequence
tttgtttcttgtcctagttgttcca

SEQ ID NO: 308076 - DNA, 25 bp, Probe Sequence
tattggtttgttattcttttccaga

SEQ ID NO: 308077 - DNA, 25 bp, Probe Sequence
tatttatatggctttttttcttcga

SEQ ID NO: 308078 - DNA, 25 bp, Probe Sequence
tatttcatctgggtggagttcattt

SEQ ID NO: 308079 - DNA, 25 bp, Probe Sequence
tattctgtgcatgggtaagtaactt

SEQ ID NO: 308080 - DNA, 25 bp, Probe Sequence
tattttgcatctgtaactaaccgtg

SEQ ID NO: 308081 - DNA, 25 bp, Probe Sequence
tattaatgccatgtactttctcctt

SEQ ID NO: 308082 - DNA, 25 bp, Probe Sequence
tattcaatccatattttctctgact

SEQ ID NO: 308083 - DNA, 25 bp, Probe Sequence
tattcactgtcactttttctcatgt

SEQ ID NO: 308084 - DNA, 25 bp, Probe Sequence
tattgggtgccatttgatattcatg

SEQ ID NO: 308085 - DNA, 25 bp, Probe Sequence
tttgtgggccatttaattcagggcc

SEQ ID NO: 308086 - DNA, 25 bp, Probe Sequence
ttatgggagcgtttcctactgggca

SEQ ID NO: 308087 - DNA, 25 bp, Probe Sequence
ttagggagatggtatcccctggagt

SEQ ID NO: 308088 - DNA, 25 bp, Probe Sequence
tttggaaatggaacttcctggtgtg

SEQ ID NO: 308089 - DNA, 25 bp, Probe Sequence
tttgggtaggtgacctgcttggatc

SEQ ID NO: 308090 - DNA, 25 bp, Probe Sequence
tattagtttgggtcccggcagcatc

SEQ ID NO: 308091 - DNA, 25 bp, Probe Sequence
tattctgtcctgagaccacgggcaa

SEQ ID NO: 308092 - DNA, 25 bp, Probe Sequence
tattttgaatgatgagccttcgtgc

SEQ ID NO: 308093 - DNA, 25 bp, Probe Sequence
tatttatgaaatactcagcttaggc

SEQ ID NO: 308094 - DNA, 25 bp, Probe Sequence
tattggaaatatctcagttagtgac

SEQ ID NO: 308095 - DNA, 25 bp, Probe Sequence
tattatgccagaacttgcgtaagaa

SEQ ID NO: 308096 - DNA, 25 bp, Probe Sequence
tatattacagtacttcttaatgaag

SEQ ID NO: 308097 - DNA, 25 bp, Probe Sequence
tatttacagtgtaccctttgaatgg

SEQ ID NO: 308098 - DNA, 25 bp, Probe Sequence
tattttaggtttcctttgacattct

SEQ ID NO: 308099 - DNA, 25 bp, Probe Sequence
tattttaggagttgcctttatgttt

SEQ ID NO: 308100 - DNA, 25 bp, Probe Sequence
tatttataagagatcctttcccatt

SEQ ID NO: 308101 - DNA, 25 bp, Probe Sequence
tatttgaaatagtccacttcacctt

SEQ ID NO: 308102 - DNA, 25 bp, Probe Sequence
tattataaatagcccacctgaactc

SEQ ID NO: 308103 - DNA, 25 bp, Probe Sequence
tattgaaagtcagccctcgacacaa

SEQ ID NO: 308104 - DNA, 25 bp, Probe Sequence
tattactctgtcgcttccgacatca

SEQ ID NO: 308105 - DNA, 25 bp, Probe Sequence
tattacacgttcgttgtcaacatta

SEQ ID NO: 308106 - DNA, 25 bp, Probe Sequence
tatttgcactgtgcctttcaactcc

SEQ ID NO: 308107 - DNA, 25 bp, Probe Sequence
tttctgaatgttatctccaaccagg

SEQ ID NO: 308108 - DNA, 25 bp, Probe Sequence
tttcaggattcttcccctaattggc

SEQ ID NO: 308109 - DNA, 25 bp, Probe Sequence
tttgggttttcctagctacatctgg

SEQ ID NO: 308110 - DNA, 25 bp, Probe Sequence
tttggatggcatttcccatgcacct

SEQ ID NO: 308111 - DNA, 25 bp, Probe Sequence
ttgtagatggaaccaccaacggtgg

SEQ ID NO: 308112 - DNA, 25 bp, Probe Sequence
ttgtagggtacagaatagagcgtgt

SEQ ID NO: 308113 - DNA, 25 bp, Probe Sequence
ttgtagggtagagagacgctgggtg

SEQ ID NO: 308114 - DNA, 25 bp, Probe Sequence
tatttgggtaggtgacctgcttgga

SEQ ID NO: 308115 - DNA, 25 bp, Probe Sequence
tatttggggaggggcactgtctctt

SEQ ID NO: 308116 - DNA, 25 bp, Probe Sequence
tatttggagtggaggcattgttttt

SEQ ID NO: 308117 - DNA, 25 bp, Probe Sequence
tatttcgtttgatttcttgtgtttt

SEQ ID NO: 308118 - DNA, 25 bp, Probe Sequence
tatttcggtacacttttgtttatat

SEQ ID NO: 308119 - DNA, 25 bp, Probe Sequence
tatttcagcattacctttttttcat

SEQ ID NO: 308120 - DNA, 25 bp, Probe Sequence
tattaccatgtgatcgttttgcagt

SEQ ID NO: 308121 - DNA, 25 bp, Probe Sequence
tattcactaggtaaattttcagttt

SEQ ID NO: 308122 - DNA, 25 bp, Probe Sequence
tattcttacgtttactctgctttgt

SEQ ID NO: 308123 - DNA, 25 bp, Probe Sequence
tatttctacttataacctgttgcta

SEQ ID NO: 308124 - DNA, 25 bp, Probe Sequence
ttggttcctttgatagccattcagt

SEQ ID NO: 308125 - DNA, 25 bp, Probe Sequence
ttagtctccttttcagggatgtcgt

SEQ ID NO: 308126 - DNA, 25 bp, Probe Sequence
tatttcttgtatttcagggttcctg

SEQ ID NO: 308127 - DNA, 25 bp, Probe Sequence
tatttggatgtatatcagtggagaa

SEQ ID NO: 308128 - DNA, 25 bp, Probe Sequence
tatattggtggttctcagcaagaga

SEQ ID NO: 308129 - DNA, 25 bp, Probe Sequence
tattctaatgtttgccaggaaaggc

SEQ ID NO: 308130 - DNA, 25 bp, Probe Sequence
tatttaatgctgatctactataagg

SEQ ID NO: 308131 - DNA, 25 bp, Probe Sequence
tatttacagctgaagctctcttgaa

SEQ ID NO: 308132 - DNA, 25 bp, Probe Sequence
tattttcctgcagcatcttctgcaa

SEQ ID NO: 308133 - DNA, 25 bp, Probe Sequence
tattttcactggcttctctatattc

SEQ ID NO: 308134 - DNA, 25 bp, Probe Sequence
tattttctgttgtcttctcaaattc

SEQ ID NO: 308135 - DNA, 25 bp, Probe Sequence
tattcagtatttccaatctataatt

SEQ ID NO: 308136 - DNA, 25 bp, Probe Sequence
tttaaattgacccatcatcataaaa

SEQ ID NO: 308137 - DNA, 25 bp, Probe Sequence
tttggacctaacactatacacagag

SEQ ID NO: 308138 - DNA, 25 bp, Probe Sequence
tttgttccttaaagcaataactgac

SEQ ID NO: 308139 - DNA, 25 bp, Probe Sequence
tttgtatagttaacacactaccgaa

SEQ ID NO: 308140 - DNA, 25 bp, Probe Sequence
ttcttaaagttaccacatcccacaa

SEQ ID NO: 308141 - DNA, 25 bp, Probe Sequence
ttttcaagaattgacacccaagacc

SEQ ID NO: 308142 - DNA, 25 bp, Probe Sequence
tattgtcaaccttaacacccatcac

SEQ ID NO: 308143 - DNA, 25 bp, Probe Sequence
tattgtcaaccttaacacccatcac

SEQ ID NO: 308144 - DNA, 25 bp, Probe Sequence
tattgctgcaactggcaaacctgcc

SEQ ID NO: 308145 - DNA, 25 bp, Probe Sequence
tattgtattatgtgacaaccatgca

SEQ ID NO: 308146 - DNA, 25 bp, Probe Sequence
tatattcttatatatctcacgtgca

SEQ ID NO: 308147 - DNA, 25 bp, Probe Sequence
tatattcctgcataactcaatctga

SEQ ID NO: 308148 - DNA, 25 bp, Probe Sequence
tatatatacaagtaactcataggaa

SEQ ID NO: 308149 - DNA, 25 bp, Probe Sequence
tattatacaaatcactatcgctcta

SEQ ID NO: 308150 - DNA, 25 bp, Probe Sequence
tatttcaataataacttcctgtttc

SEQ ID NO: 308151 - DNA, 25 bp, Probe Sequence
tttctgcagaacttactgtacagtt

SEQ ID NO: 308152 - DNA, 25 bp, Probe Sequence
tattctcaggagttgcttgtacatt

SEQ ID NO: 308153 - DNA, 25 bp, Probe Sequence
tattccagagcctgtctgctatagc

SEQ ID NO: 308154 - DNA, 25 bp, Probe Sequence
tattccagatctgcagtcacttcgt

SEQ ID NO: 308155 - DNA, 25 bp, Probe Sequence
tattccagtgtggcatatgtgcccc

SEQ ID NO: 308156 - DNA, 25 bp, Probe Sequence
tattccaggatggatccagcctcca

SEQ ID NO: 308157 - DNA, 25 bp, Probe Sequence
tattcttggtgctgccacctagagg

SEQ ID NO: 308158 - DNA, 25 bp, Probe Sequence
tattttgtgtgtggcacctcatcgc

SEQ ID NO: 308159 - DNA, 25 bp, Probe Sequence
tattttgtatttggcaactgtgggc

SEQ ID NO: 308160 - DNA, 25 bp, Probe Sequence
tttctggtttttgactggaactgga

SEQ ID NO: 308161 - DNA, 25 bp, Probe Sequence
tttggccttttagacttggactgag

SEQ ID NO: 308162 - DNA, 25 bp, Probe Sequence
tttggctgtttttgtagttggattg

SEQ ID NO: 308163 - DNA, 25 bp, Probe Sequence
tatttgcttttgagtagtttgtatt

SEQ ID NO: 308164 - DNA, 25 bp, Probe Sequence
tatttttgtaatggtagctttttct

SEQ ID NO: 308165 - DNA, 25 bp, Probe Sequence
tatttgtgtctgttactactttttt

SEQ ID NO: 308166 - DNA, 25 bp, Probe Sequence
tattgctttatgttttgacctttat

SEQ ID NO: 308167 - DNA, 25 bp, Probe Sequence
tattcttgtggtttgtgacccaatt

SEQ ID NO: 308168 - DNA, 25 bp, Probe Sequence
tatttgtgtggttatatagcccttt

SEQ ID NO: 308169 - DNA, 25 bp, Probe Sequence
tatttcttggatttatagtacctta

SEQ ID NO: 308170 - DNA, 25 bp, Probe Sequence
tttgtttattagctagttcctgtaa

SEQ ID NO: 308171 - DNA, 25 bp, Probe Sequence
tattgtgtaattacttggttccatt

SEQ ID NO: 308172 - DNA, 25 bp, Probe Sequence
tattttaatttggatggcagtctca

SEQ ID NO: 308173 - DNA, 25 bp, Probe Sequence
tattttagtctttattctcttcctt

SEQ ID NO: 308174 - DNA, 25 bp, Probe Sequence
tattttatcctttgattctccttca

SEQ ID NO: 308175 - DNA, 25 bp, Probe Sequence
tatttaactcatatgatctcccttc

SEQ ID NO: 308176 - DNA, 25 bp, Probe Sequence
tattttcacacatttaattcctatt

SEQ ID NO: 308177 - DNA, 25 bp, Probe Sequence
tatttatgaacatctttgtgccaat

SEQ ID NO: 308178 - DNA, 25 bp, Probe Sequence
tattcttgtacttgtctcaggccaa

SEQ ID NO: 308179 - DNA, 25 bp, Probe Sequence
tatttcttcacttttaacacaagtt

SEQ ID NO: 308180 - DNA, 25 bp, Probe Sequence
tttgtcattgccacttcaaccaaaa

SEQ ID NO: 308181 - DNA, 25 bp, Probe Sequence
tttggcggctccatttaccagaaag

SEQ ID NO: 308182 - DNA, 25 bp, Probe Sequence
tttggtggaggcaacctgaccagaa

SEQ ID NO: 308183 - DNA, 25 bp, Probe Sequence
tttggtcgggcagccgcacactatg

SEQ ID NO: 308184 - DNA, 25 bp, Probe Sequence
tttgtgtccggagctcaggagttcc

SEQ ID NO: 308185 - DNA, 25 bp, Probe Sequence
ttgtgtttgggagccatgggggagc

SEQ ID NO: 308186 - DNA, 25 bp, Probe Sequence
tattgttatggctcccagtgggtat

SEQ ID NO: 308187 - DNA, 25 bp, Probe Sequence
tatttttggtaccactgcttgagta

SEQ ID NO: 308188 - DNA, 25 bp, Probe Sequence
tcttcgtaggcatgatccgccacta

SEQ ID NO: 308189 - DNA, 25 bp, Probe Sequence
tattatgtgcaggtcctagcctggg

SEQ ID NO: 308190 - DNA, 25 bp, Probe Sequence
tattcatggaggacacactgctaag

SEQ ID NO: 308191 - DNA, 25 bp, Probe Sequence
tattgcaggaggccacactgatgtt

SEQ ID NO: 308192 - DNA, 25 bp, Probe Sequence
tttgtggagcgaacactgcggctgg

SEQ ID NO: 308193 - DNA, 25 bp, Probe Sequence
tttgtgagagcgaggctgagcctac

SEQ ID NO: 308194 - DNA, 25 bp, Probe Sequence
ttatgccgactatagctacgctagc

SEQ ID NO: 308195 - DNA, 25 bp, Probe Sequence
ttaatggactttcctactgccagta

SEQ ID NO: 308196 - DNA, 25 bp, Probe Sequence
tattgtgtttttcttctgccaattt

SEQ ID NO: 308197 - DNA, 25 bp, Probe Sequence
tttctaagtgtccctttcctatgta

SEQ ID NO: 308198 - DNA, 25 bp, Probe Sequence
tatttagaggtctttttgcctcttt

SEQ ID NO: 308199 - DNA, 25 bp, Probe Sequence
tatttagaggtctttttgcctcttt

SEQ ID NO: 308200 - DNA, 25 bp, Probe Sequence
tattctagggtcttactctttgtat

SEQ ID NO: 308201 - DNA, 25 bp, Probe Sequence
tatttaaggaatatctcttgatata

SEQ ID NO: 308202 - DNA, 25 bp, Probe Sequence
tatttgattggtattctgttctgaa

SEQ ID NO: 308203 - DNA, 25 bp, Probe Sequence
tattattgtgggttgttggtttatt

SEQ ID NO: 308204 - DNA, 25 bp, Probe Sequence
tattcggtgagcggtggtggtttat

SEQ ID NO: 308205 - DNA, 25 bp, Probe Sequence
ttccaaggtgccatgagggttaatc

SEQ ID NO: 308206 - DNA, 25 bp, Probe Sequence
tttcaacgtggcagagggcgcttta

SEQ ID NO: 308207 - DNA, 25 bp, Probe Sequence
tattgatacttggggagggtgcttg

SEQ ID NO: 308208 - DNA, 25 bp, Probe Sequence
tattgatagtttttgggcttttttg

SEQ ID NO: 308209 - DNA, 25 bp, Probe Sequence
tattcaagtcttctggagcctttct

SEQ ID NO: 308210 - DNA, 25 bp, Probe Sequence
tattcaaccttgaaaagcccttctc

SEQ ID NO: 308211 - DNA, 25 bp, Probe Sequence
tattccacctgataatagcccagat

SEQ ID NO: 308212 - DNA, 25 bp, Probe Sequence
tattccactagatagatactaaagt

SEQ ID NO: 308213 - DNA, 25 bp, Probe Sequence
tttccactagtttcccattaagtag

SEQ ID NO: 308214 - DNA, 25 bp, Probe Sequence
tttgaacaagtttccctttattgag

SEQ ID NO: 308215 - DNA, 25 bp, Probe Sequence
tttgtaaagttacctgctgttagct

SEQ ID NO: 308216 - DNA, 25 bp, Probe Sequence
tttggaaattttgatgcttgtataa

SEQ ID NO: 308217 - DNA, 25 bp, Probe Sequence
tttggctaagttgggattgagtttc

SEQ ID NO: 308218 - DNA, 25 bp, Probe Sequence
tttggctaagttgggattgagtttc

SEQ ID NO: 308219 - DNA, 25 bp, Probe Sequence
tttggctaagttgggattgagtttc

SEQ ID NO: 308220 - DNA, 25 bp, Probe Sequence
tttgactaggttttccagagatctt

SEQ ID NO: 308221 - DNA, 25 bp, Probe Sequence
ttatcagtagagtttccccatcttt

SEQ ID NO: 308222 - DNA, 25 bp, Probe Sequence
tattagatattgtattccctccttt

SEQ ID NO: 308223 - DNA, 25 bp, Probe Sequence
tatttttattgcataccccatcatt

SEQ ID NO: 308224 - DNA, 25 bp, Probe Sequence
tattacattttgactaccacaactc

SEQ ID NO: 308225 - DNA, 25 bp, Probe Sequence
tattccagcttgggtgacagagcaa

SEQ ID NO: 308226 - DNA, 25 bp, Probe Sequence
tattctggcctggggcacaagagca

SEQ ID NO: 308227 - DNA, 25 bp, Probe Sequence
tattgatgcgggccaacatccaggc

SEQ ID NO: 308228 - DNA, 25 bp, Probe Sequence
tattaagggacaactcacatcagag

SEQ ID NO: 308229 - DNA, 25 bp, Probe Sequence
tttgccagtaactctgccatcagac

SEQ ID NO: 308230 - DNA, 25 bp, Probe Sequence
tttcaactgacctctggacgcagaa

SEQ ID NO: 308231 - DNA, 25 bp, Probe Sequence
tttggagtatcccagtgcgacgcaa

SEQ ID NO: 308232 - DNA, 25 bp, Probe Sequence
tttgtatttggcaactgtgggcaat

SEQ ID NO: 308233 - DNA, 25 bp, Probe Sequence
tattgtccaaggacctgatcccaac

SEQ ID NO: 308234 - DNA, 25 bp, Probe Sequence
tattgaagtagatcctgacactaag

SEQ ID NO: 308235 - DNA, 25 bp, Probe Sequence
tattgagcgtccaacctatactaac

SEQ ID NO: 308236 - DNA, 25 bp, Probe Sequence
tatttgctgttcaagttaatctaga

SEQ ID NO: 308237 - DNA, 25 bp, Probe Sequence
tatttcagatacaagcatgtaacaa

SEQ ID NO: 308238 - DNA, 25 bp, Probe Sequence
tttgtcgatcacccattgcagaagc

SEQ ID NO: 308239 - DNA, 25 bp, Probe Sequence
tatttcagtgccccttgcagaaaaa

SEQ ID NO: 308240 - DNA, 25 bp, Probe Sequence
tttgtcacacaaccacagcaaaaaa

SEQ ID NO: 308241 - DNA, 25 bp, Probe Sequence
ttttgccacaaggggcacaaaatgt

SEQ ID NO: 308242 - DNA, 25 bp, Probe Sequence
tatttgctccaagtagccacaacaa

SEQ ID NO: 308243 - DNA, 25 bp, Probe Sequence
tttggatgcccagtacaacagaaat

SEQ ID NO: 308244 - DNA, 25 bp, Probe Sequence
tttggagccagaggcaacagtgcat

SEQ ID NO: 308245 - DNA, 25 bp, Probe Sequence
tttgagaccaaaccaagtgcttcca

SEQ ID NO: 308246 - DNA, 25 bp, Probe Sequence
tttggactacaagaagagcttcctt

SEQ ID NO: 308247 - DNA, 25 bp, Probe Sequence
tttccgcgtacagaagtgcttgccc

SEQ ID NO: 308248 - DNA, 25 bp, Probe Sequence
tttacgcaatagcgacgcgctggcg

SEQ ID NO: 308249 - DNA, 25 bp, Probe Sequence
tttctaattaatcaccgctggccat

SEQ ID NO: 308250 - DNA, 25 bp, Probe Sequence
tattataataaacaccctcaccact

SEQ ID NO: 308251 - DNA, 25 bp, Probe Sequence
tattttctaatttaccactactcct

SEQ ID NO: 308252 - DNA, 25 bp, Probe Sequence
tattcttaaagttaccacatcccac

SEQ ID NO: 308253 - DNA, 25 bp, Probe Sequence
tatttctaaaggtaccaagataatt

SEQ ID NO: 308254 - DNA, 25 bp, Probe Sequence
tttgtatacagagaaccggatgaat

SEQ ID NO: 308255 - DNA, 25 bp, Probe Sequence
tttggtgaagacctcatccagggcc

SEQ ID NO: 308256 - DNA, 25 bp, Probe Sequence
tttggcgaagatcccactggaaccc

SEQ ID NO: 308257 - DNA, 25 bp, Probe Sequence
tttggggctttatcggaatcccgct

SEQ ID NO: 308258 - DNA, 25 bp, Probe Sequence
tttggagccttgtggtggaatcccc

SEQ ID NO: 308259 - DNA, 25 bp, Probe Sequence
tttggagccttgtggtggaatcccc

SEQ ID NO: 308260 - DNA, 25 bp, Probe Sequence
tttgggccttgaagagtaattgact

SEQ ID NO: 308261 - DNA, 25 bp, Probe Sequence
tttggtcccagacagcggggatccg

SEQ ID NO: 308262 - DNA, 25 bp, Probe Sequence
tattgggccaagcccagaagtggtc

SEQ ID NO: 308263 - DNA, 25 bp, Probe Sequence
tattgtggcctaccccaaatggatt

SEQ ID NO: 308264 - DNA, 25 bp, Probe Sequence
tattgggccatatcttaaatgcata

SEQ ID NO: 308265 - DNA, 25 bp, Probe Sequence
tattggtgcctttcctacagagcaa

SEQ ID NO: 308266 - DNA, 25 bp, Probe Sequence
tattgactctttttgctactacata

SEQ ID NO: 308267 - DNA, 25 bp, Probe Sequence
tttacacttttactagctaaaacat

SEQ ID NO: 308268 - DNA, 25 bp, Probe Sequence
tattgtccttttttactggaagacg

SEQ ID NO: 308269 - DNA, 25 bp, Probe Sequence
tattgtccttttttactggaagacg

SEQ ID NO: 308270 - DNA, 25 bp, Probe Sequence
tatttccaacttgtcacttgccagt

SEQ ID NO: 308271 - DNA, 25 bp, Probe Sequence
tatttcatccctaatagcacttcgc

SEQ ID NO: 308272 - DNA, 25 bp, Probe Sequence
tatttctggatcacaatgacttaaa

SEQ ID NO: 308273 - DNA, 25 bp, Probe Sequence
tattgttggtaggcacatcgtgtca

SEQ ID NO: 308274 - DNA, 25 bp, Probe Sequence
tattttgggaccttctgtgtaaaag

SEQ ID NO: 308275 - DNA, 25 bp, Probe Sequence
tattcaattgagacctttagctaac

SEQ ID NO: 308276 - DNA, 25 bp, Probe Sequence
tattatttggatgtatatcagtgga

SEQ ID NO: 308277 - DNA, 25 bp, Probe Sequence
tttgtttcacatgatttcagggatc

SEQ ID NO: 308278 - DNA, 25 bp, Probe Sequence
ttttttccggcgttcaagatgtcga

SEQ ID NO: 308279 - DNA, 25 bp, Probe Sequence
tttacttccggtttcttcatattga

SEQ ID NO: 308280 - DNA, 25 bp, Probe Sequence
tattactgttcttattgtttttgga

SEQ ID NO: 308281 - DNA, 25 bp, Probe Sequence
tattcctgttgggttttcttgttga

SEQ ID NO: 308282 - DNA, 25 bp, Probe Sequence
tattatctgttgccttatttctcat

SEQ ID NO: 308283 - DNA, 25 bp, Probe Sequence
tattatcttgggttctttgtaaaat

SEQ ID NO: 308284 - DNA, 25 bp, Probe Sequence
tattatgcccgacatcttttaatca

SEQ ID NO: 308285 - DNA, 25 bp, Probe Sequence
tattatcatttctgtgccttctaat

SEQ ID NO: 308286 - DNA, 25 bp, Probe Sequence
tatttaccactaagacttctgactc

SEQ ID NO: 308287 - DNA, 25 bp, Probe Sequence
tattttctcaattagatctcttttc

SEQ ID NO: 308288 - DNA, 25 bp, Probe Sequence
tattattctcatttagtgccctctt

SEQ ID NO: 308289 - DNA, 25 bp, Probe Sequence
tattatctctaattagtgccaccag

SEQ ID NO: 308290 - DNA, 25 bp, Probe Sequence
tatttcttgctctaaaacccagggg

SEQ ID NO: 308291 - DNA, 25 bp, Probe Sequence
tttgacgtccatagaagacccggga

SEQ ID NO: 308292 - DNA, 25 bp, Probe Sequence
tttgacctccatagaagacaccggg

SEQ ID NO: 308293 - DNA, 25 bp, Probe Sequence
tttgacctccatagaagacaccggg

SEQ ID NO: 308294 - DNA, 25 bp, Probe Sequence
tttgacctccatagaagacaccggg

SEQ ID NO: 308295 - DNA, 25 bp, Probe Sequence
tttgacctccatagaagacaccggg

SEQ ID NO: 308296 - DNA, 25 bp, Probe Sequence
tttgacctccatagaagacaccggg

SEQ ID NO: 308297 - DNA, 25 bp, Probe Sequence
tttgatgtctccaagtagtccacct

SEQ ID NO: 308298 - DNA, 25 bp, Probe Sequence
tattgatgcttagggtcgtctgacc

SEQ ID NO: 308299 - DNA, 25 bp, Probe Sequence
tttgagcagctggtgcgggctgtcc

SEQ ID NO: 308300 - DNA, 25 bp, Probe Sequence
tttgggcgttgctaggctgaaaggg

SEQ ID NO: 308301 - DNA, 25 bp, Probe Sequence
tttggggattcacgtggtggcggtg

SEQ ID NO: 308302 - DNA, 25 bp, Probe Sequence
tttggggattagggaagcaaggaag

SEQ ID NO: 308303 - DNA, 25 bp, Probe Sequence
tttggggtcaagagaggcataggta

SEQ ID NO: 308304 - DNA, 25 bp, Probe Sequence
ttccggggtgagacgggcaaggaca

SEQ ID NO: 308305 - DNA, 25 bp, Probe Sequence
tttgggggtgacaggtgctttgaca

SEQ ID NO: 308306 - DNA, 25 bp, Probe Sequence
tttgttggtggggaggtcattggac

SEQ ID NO: 308307 - DNA, 25 bp, Probe Sequence
tttgtctcgtggggggatggtggac

SEQ ID NO: 308308 - DNA, 25 bp, Probe Sequence
ttttggcggggtccgcatcgaggag

SEQ ID NO: 308309 - DNA, 25 bp, Probe Sequence
tttctggtatcggtggccacttgga

SEQ ID NO: 308310 - DNA, 25 bp, Probe Sequence
tattcggatatgtatcgatgccttt

SEQ ID NO: 308311 - DNA, 25 bp, Probe Sequence
tattctaagcaaatctgtgtctact

SEQ ID NO: 308312 - DNA, 25 bp, Probe Sequence
tattcatccacatattgcaatgcta

SEQ ID NO: 308313 - DNA, 25 bp, Probe Sequence
tattctcagccattttgggcatatg

SEQ ID NO: 308314 - DNA, 25 bp, Probe Sequence
tatttcagcacaatcttagactcat

SEQ ID NO: 308315 - DNA, 25 bp, Probe Sequence
tatttcagcattggctctacagcgt

SEQ ID NO: 308316 - DNA, 25 bp, Probe Sequence
tatttagctgtcactagcactcttc

SEQ ID NO: 308317 - DNA, 25 bp, Probe Sequence
tatttagctgcagtatcaatgtggc

SEQ ID NO: 308318 - DNA, 25 bp, Probe Sequence
tattaatggtgtacagttggatctg

SEQ ID NO: 308319 - DNA, 25 bp, Probe Sequence
tattactagtgatcagttatactgt

SEQ ID NO: 308320 - DNA, 25 bp, Probe Sequence
tattcctccctatgttcatactata

SEQ ID NO: 308321 - DNA, 25 bp, Probe Sequence
tattgcgctgcttcgaagattcgac

SEQ ID NO: 308322 - DNA, 25 bp, Probe Sequence
tattcatgtttccacaaatcaagac

SEQ ID NO: 308323 - DNA, 25 bp, Probe Sequence
tattcatgatcataccaactcccac

SEQ ID NO: 308324 - DNA, 25 bp, Probe Sequence
tattcagaaaatccagaccccagcc

SEQ ID NO: 308325 - DNA, 25 bp, Probe Sequence
tttcagaagactcagtacctcgcct

SEQ ID NO: 308326 - DNA, 25 bp, Probe Sequence
tttaataacatgcatgggtccctct

SEQ ID NO: 308327 - DNA, 25 bp, Probe Sequence
tattagtagtctccaaggtcctcac

SEQ ID NO: 308328 - DNA, 25 bp, Probe Sequence
tttggttgatgttaaggccctccat

SEQ ID NO: 308329 - DNA, 25 bp, Probe Sequence
ttatggttttagaaacccatacaca

SEQ ID NO: 308330 - DNA, 25 bp, Probe Sequence
tttggttctcggattccaggcacca

SEQ ID NO: 308331 - DNA, 25 bp, Probe Sequence
tttggtggccaaggttccaaccaag

SEQ ID NO: 308332 - DNA, 25 bp, Probe Sequence
tttgggcgccaaaggtaccactgca

SEQ ID NO: 308333 - DNA, 25 bp, Probe Sequence
tttggtggccagtatggaatccaga

SEQ ID NO: 308334 - DNA, 25 bp, Probe Sequence
tttggttctcacttccaacttagga

SEQ ID NO: 308335 - DNA, 25 bp, Probe Sequence
tttggaaaacattgcccctgtaggc

SEQ ID NO: 308336 - DNA, 25 bp, Probe Sequence
tttggagaaacattcccagctgtaa

SEQ ID NO: 308337 - DNA, 25 bp, Probe Sequence
tttggcagacagtaacgtcagttga

SEQ ID NO: 308338 - DNA, 25 bp, Probe Sequence
ttttggacctgaccgatgcaatcga

SEQ ID NO: 308339 - DNA, 25 bp, Probe Sequence
tttattgacctggtggtagatccac

SEQ ID NO: 308340 - DNA, 25 bp, Probe Sequence
tattcataacccagctgtggaccac

SEQ ID NO: 308341 - DNA, 25 bp, Probe Sequence
tttggaacgacttgttgggagcaca

SEQ ID NO: 308342 - DNA, 25 bp, Probe Sequence
tattggtgaccgacagactgggaaa

SEQ ID NO: 308343 - DNA, 25 bp, Probe Sequence
ttctcgatgcactcacaagcgggta

SEQ ID NO: 308344 - DNA, 25 bp, Probe Sequence
tattctgatgactcacagagccgga

SEQ ID NO: 308345 - DNA, 25 bp, Probe Sequence
tattcagatgactgcagaacctgga

SEQ ID NO: 308346 - DNA, 25 bp, Probe Sequence
tattgagtatattgagtaccttcaa

SEQ ID NO: 308347 - DNA, 25 bp, Probe Sequence
tattcttatatatctcacgtgcata

SEQ ID NO: 308348 - DNA, 25 bp, Probe Sequence
tatttttatttctatagtgatgact

SEQ ID NO: 308349 - DNA, 25 bp, Probe Sequence
tatttatgtattgtgcaatgtgtat

SEQ ID NO: 308350 - DNA, 25 bp, Probe Sequence
tatttattatatgtgcacttcaaga

SEQ ID NO: 308351 - DNA, 25 bp, Probe Sequence
tatttattagctgtagcattctctg

SEQ ID NO: 308352 - DNA, 25 bp, Probe Sequence
tattttctactgtatccatttcaaa

SEQ ID NO: 308353 - DNA, 25 bp, Probe Sequence
tattttctactgtatccatttcaaa

SEQ ID NO: 308354 - DNA, 25 bp, Probe Sequence
tattatgtctgcttaaatcatttaa

SEQ ID NO: 308355 - DNA, 25 bp, Probe Sequence
tattttttgtaactcttgtgtagat

SEQ ID NO: 308356 - DNA, 25 bp, Probe Sequence
tattttatatctgttttgctgtaac

SEQ ID NO: 308357 - DNA, 25 bp, Probe Sequence
tattgtattctggggtatggcgtaa

SEQ ID NO: 308358 - DNA, 25 bp, Probe Sequence
tattcagatctgggtggctcagggc

SEQ ID NO: 308359 - DNA, 25 bp, Probe Sequence
tattgctgctggagggctgtgggct

SEQ ID NO: 308360 - DNA, 25 bp, Probe Sequence
tattgcttggattctacgtgcagcg

SEQ ID NO: 308361 - DNA, 25 bp, Probe Sequence
tattctcaggctcctatgcctgggc

SEQ ID NO: 308362 - DNA, 25 bp, Probe Sequence
tttgatcgactgctacgttgaccat

SEQ ID NO: 308363 - DNA, 25 bp, Probe Sequence
tttgatccccgatttgttgtgctca

SEQ ID NO: 308364 - DNA, 25 bp, Probe Sequence
tttgtttctcgatcttttgtttgga

SEQ ID NO: 308365 - DNA, 25 bp, Probe Sequence
tttgtttcagggtttatggatttgt

SEQ ID NO: 308366 - DNA, 25 bp, Probe Sequence
tttcttttggggcttcagattttat

SEQ ID NO: 308367 - DNA, 25 bp, Probe Sequence
tattatttttggccgttagttatct

SEQ ID NO: 308368 - DNA, 25 bp, Probe Sequence
tattttgttgttactttagttcatc

SEQ ID NO: 308369 - DNA, 25 bp, Probe Sequence
tattttgtttctcaccatatgcttt

SEQ ID NO: 308370 - DNA, 25 bp, Probe Sequence
tattatggtttctaaatcagttatt

SEQ ID NO: 308371 - DNA, 25 bp, Probe Sequence
tattaagtagtctagatctcagtta

SEQ ID NO: 308372 - DNA, 25 bp, Probe Sequence
tatttagtagtgtatctcatagata

SEQ ID NO: 308373 - DNA, 25 bp, Probe Sequence
tattctaattgttgatccaggtatt

SEQ ID NO: 308374 - DNA, 25 bp, Probe Sequence
tattccagatggagtcgctgacata

SEQ ID NO: 308375 - DNA, 25 bp, Probe Sequence
tattctcagcaaatagacctgtcaa

SEQ ID NO: 308376 - DNA, 25 bp, Probe Sequence
tattgtcattgtagaagcggtcact

SEQ ID NO: 308377 - DNA, 25 bp, Probe Sequence
tattggattgccacacggctcacat

SEQ ID NO: 308378 - DNA, 25 bp, Probe Sequence
tttggatgccacagatcctgcttca

SEQ ID NO: 308379 - DNA, 25 bp, Probe Sequence
tattagacaggcagcatcctctctt

SEQ ID NO: 308380 - DNA, 25 bp, Probe Sequence
tattagcatcagtcaacccctgcta

SEQ ID NO: 308381 - DNA, 25 bp, Probe Sequence
tattagctgtgatcatccacaagcc

SEQ ID NO: 308382 - DNA, 25 bp, Probe Sequence
tattatcatctctctctatcacaga

SEQ ID NO: 308383 - DNA, 25 bp, Probe Sequence
tatttattgcatacttgcacatcaa

SEQ ID NO: 308384 - DNA, 25 bp, Probe Sequence
tattgctttaatctgcactcattga

SEQ ID NO: 308385 - DNA, 25 bp, Probe Sequence
tattgttatacacagctttatgata

SEQ ID NO: 308386 - DNA, 25 bp, Probe Sequence
tattttatcccaagtgactatacaa

SEQ ID NO: 308387 - DNA, 25 bp, Probe Sequence
tattttattttgtcagcactaaaag

SEQ ID NO: 308388 - DNA, 25 bp, Probe Sequence
tatttatattgcagtatcctttaaa

SEQ ID NO: 308389 - DNA, 25 bp, Probe Sequence
tattttgcattttgtctacttgtaa

SEQ ID NO: 308390 - DNA, 25 bp, Probe Sequence
tattattgttgtttcatactttaaa

SEQ ID NO: 308391 - DNA, 25 bp, Probe Sequence
tattttgatagtttgtggattctaa

SEQ ID NO: 308392 - DNA, 25 bp, Probe Sequence
tattttgatagtttctttccgtaag

SEQ ID NO: 308393 - DNA, 25 bp, Probe Sequence
tattcattatagctattcgtcctgt

SEQ ID NO: 308394 - DNA, 25 bp, Probe Sequence
tattctgttgaccataaaaccttga

SEQ ID NO: 308395 - DNA, 25 bp, Probe Sequence
tattctttactcccagaagactgta

SEQ ID NO: 308396 - DNA, 25 bp, Probe Sequence
tattctttaattcctacaaggtact

SEQ ID NO: 308397 - DNA, 25 bp, Probe Sequence
tattctttcaccacttaattttctt

SEQ ID NO: 308398 - DNA, 25 bp, Probe Sequence
tattttgaccctttatatttgttct

SEQ ID NO: 308399 - DNA, 25 bp, Probe Sequence
tattttgacctaattatgtttgatt

SEQ ID NO: 308400 - DNA, 25 bp, Probe Sequence
tattagtgacctatgacagtttgtc

SEQ ID NO: 308401 - DNA, 25 bp, Probe Sequence
tattcattcctcagtacagtgttcc

SEQ ID NO: 308402 - DNA, 25 bp, Probe Sequence
tattattcccattctacatactatg

SEQ ID NO: 308403 - DNA, 25 bp, Probe Sequence
tattttcccacagatatactatata

SEQ ID NO: 308404 - DNA, 25 bp, Probe Sequence
tattttccactcagattaatatgaa

SEQ ID NO: 308405 - DNA, 25 bp, Probe Sequence
tattagtcatctgctagttaccatg

SEQ ID NO: 308406 - DNA, 25 bp, Probe Sequence
tattagtcatcgcttttacctggtg

SEQ ID NO: 308407 - DNA, 25 bp, Probe Sequence
tattccaacgtgatattccttgaag

SEQ ID NO: 308408 - DNA, 25 bp, Probe Sequence
tattctcaacagtttctttgtagta

SEQ ID NO: 308409 - DNA, 25 bp, Probe Sequence
tattctgaacagtttagtcccaaga

SEQ ID NO: 308410 - DNA, 25 bp, Probe Sequence
ttctgtaaataaaagctcccaagtt

SEQ ID NO: 308411 - DNA, 25 bp, Probe Sequence
tttgattaaaattgactacagcggt

SEQ ID NO: 308412 - DNA, 25 bp, Probe Sequence
tttgattaatagactccattccagt

SEQ ID NO: 308413 - DNA, 25 bp, Probe Sequence
tattattgagagtatctgctttcca

SEQ ID NO: 308414 - DNA, 25 bp, Probe Sequence
tttctggcaagtttctatacgaagt

SEQ ID NO: 308415 - DNA, 25 bp, Probe Sequence
tattttcaagtcatcttagcagcta

SEQ ID NO: 308416 - DNA, 25 bp, Probe Sequence
tattttaagccttatccagcagcca

SEQ ID NO: 308417 - DNA, 25 bp, Probe Sequence
tattgttaaccttttcggcagcttt

SEQ ID NO: 308418 - DNA, 25 bp, Probe Sequence
tattttaacttccttggactcattt

SEQ ID NO: 308419 - DNA, 25 bp, Probe Sequence
tttgttacaaacctgtgggcctgtt

SEQ ID NO: 308420 - DNA, 25 bp, Probe Sequence
tattcttactaaactctgaggcctg

SEQ ID NO: 308421 - DNA, 25 bp, Probe Sequence
tttcttactagacctgtaacttttg

SEQ ID NO: 308422 - DNA, 25 bp, Probe Sequence
tattcttacaagttttaagttgtgg

SEQ ID NO: 308423 - DNA, 25 bp, Probe Sequence
tttgtagcaaaattcttaagtatgt

SEQ ID NO: 308424 - DNA, 25 bp, Probe Sequence
tttggagcaaaaactatgggttgta

SEQ ID NO: 308425 - DNA, 25 bp, Probe Sequence
tttggagccaactctaagactagaa

SEQ ID NO: 308426 - DNA, 25 bp, Probe Sequence
tttgggaactccctgaagcctgaca

SEQ ID NO: 308427 - DNA, 25 bp, Probe Sequence
tttgggaatctgacgcggatgcggc

SEQ ID NO: 308428 - DNA, 25 bp, Probe Sequence
tttgggaatagctgggctgagacct

SEQ ID NO: 308429 - DNA, 25 bp, Probe Sequence
tttgggaagcgatggatcacaaggt

SEQ ID NO: 308430 - DNA, 25 bp, Probe Sequence
tttggaggggaacgtgtcagaggga

SEQ ID NO: 308431 - DNA, 25 bp, Probe Sequence
tttggggcgggatggctgcggaaga

SEQ ID NO: 308432 - DNA, 25 bp, Probe Sequence
tttgtggggcatcaggtgctccgaa

SEQ ID NO: 308433 - DNA, 25 bp, Probe Sequence
tttgatgccgtactgtaagctccgt

SEQ ID NO: 308434 - DNA, 25 bp, Probe Sequence
tttgtccttaaaaatgctgacagtc

SEQ ID NO: 308435 - DNA, 25 bp, Probe Sequence
tttgggcctgaccatggagcataag

SEQ ID NO: 308436 - DNA, 25 bp, Probe Sequence
tttggacatcagacagtgcaggaga

SEQ ID NO: 308437 - DNA, 25 bp, Probe Sequence
tattatccatcacaggagtcagaaa

SEQ ID NO: 308438 - DNA, 25 bp, Probe Sequence
tattgactctgagagggccaccatc

SEQ ID NO: 308439 - DNA, 25 bp, Probe Sequence
tattgaccagtggatctgcgcacac

SEQ ID NO: 308440 - DNA, 25 bp, Probe Sequence
tattgctccgcatactgagaatcta

SEQ ID NO: 308441 - DNA, 25 bp, Probe Sequence
tattgctccagttaagaattgttga

SEQ ID NO: 308442 - DNA, 25 bp, Probe Sequence
tattctgcaatgtagacaatgtgat

SEQ ID NO: 308443 - DNA, 25 bp, Probe Sequence
tattctcatctgtgatctaagcatt

SEQ ID NO: 308444 - DNA, 25 bp, Probe Sequence
tattcagcatggtttgataggcatt

SEQ ID NO: 308445 - DNA, 25 bp, Probe Sequence
tattcagcatcctttatctgtgact

SEQ ID NO: 308446 - DNA, 25 bp, Probe Sequence
tattagcaccaatttcttgccacta

SEQ ID NO: 308447 - DNA, 25 bp, Probe Sequence
tttggaccacatattctccattttg

SEQ ID NO: 308448 - DNA, 25 bp, Probe Sequence
tttggagaacttgctttgatttatg

SEQ ID NO: 308449 - DNA, 25 bp, Probe Sequence
tattaagaccttgctcttcctagtc

SEQ ID NO: 308450 - DNA, 25 bp, Probe Sequence
tattaatatacatctttcccctgtc

SEQ ID NO: 308451 - DNA, 25 bp, Probe Sequence
tattaatcatacaaactctcaccat

SEQ ID NO: 308452 - DNA, 25 bp, Probe Sequence
tattaattacacctcttcacctata

SEQ ID NO: 308453 - DNA, 25 bp, Probe Sequence
tattattcatacgttattccttata

SEQ ID NO: 308454 - DNA, 25 bp, Probe Sequence
tattgtttaaggtttcctcaaactg

SEQ ID NO: 308455 - DNA, 25 bp, Probe Sequence
tttgactttacctttcctcaaagat

SEQ ID NO: 308456 - DNA, 25 bp, Probe Sequence
tattcctttaccattaagccaggct

SEQ ID NO: 308457 - DNA, 25 bp, Probe Sequence
tattctctgttaccttctaaaagcc

SEQ ID NO: 308458 - DNA, 25 bp, Probe Sequence
tattccatttgtcctttcagaaggc

SEQ ID NO: 308459 - DNA, 25 bp, Probe Sequence
tattacctcatccctttcacaggga

SEQ ID NO: 308460 - DNA, 25 bp, Probe Sequence
tattactttctgccgctgtcaaggc

SEQ ID NO: 308461 - DNA, 25 bp, Probe Sequence
tattaatatatatctgctgtccaga

SEQ ID NO: 308462 - DNA, 25 bp, Probe Sequence
tttcttagtaaagtgctgttagtat

SEQ ID NO: 308463 - DNA, 25 bp, Probe Sequence
tattttgcttacatgtgctttttaa

SEQ ID NO: 308464 - DNA, 25 bp, Probe Sequence
tattgttttactcctttttattcat

SEQ ID NO: 308465 - DNA, 25 bp, Probe Sequence
tattatggtttcccttgtatctatt

SEQ ID NO: 308466 - DNA, 25 bp, Probe Sequence
tattatggttgtactcttcttgttc

SEQ ID NO: 308467 - DNA, 25 bp, Probe Sequence
tattcaagattgtgctcttctatca

SEQ ID NO: 308468 - DNA, 25 bp, Probe Sequence
tattatgagtctctgccatttataa

SEQ ID NO: 308469 - DNA, 25 bp, Probe Sequence
tttggcagactggtacattttgcaa

SEQ ID NO: 308470 - DNA, 25 bp, Probe Sequence
tattgggagctcatgcactcttggc

SEQ ID NO: 308471 - DNA, 25 bp, Probe Sequence
tattttgtgtgcatgcctcatttcc

SEQ ID NO: 308472 - DNA, 25 bp, Probe Sequence
tattaggtgatcaccctggatgatc

SEQ ID NO: 308473 - DNA, 25 bp, Probe Sequence
tattatggtgacacctatatgaaca

SEQ ID NO: 308474 - DNA, 25 bp, Probe Sequence
tattatgtcatactaacttgtgaaa

SEQ ID NO: 308475 - DNA, 25 bp, Probe Sequence
tattcgtgctggttcatcgtgagta

SEQ ID NO: 308476 - DNA, 25 bp, Probe Sequence
tattcatatctatttgcatttgatt

SEQ ID NO: 308477 - DNA, 25 bp, Probe Sequence
tattctccattttgcattgagcagt

SEQ ID NO: 308478 - DNA, 25 bp, Probe Sequence
tattcctgctgctttcattgacagt

SEQ ID NO: 308479 - DNA, 25 bp, Probe Sequence
tattcctgctgctttcattgacagt

SEQ ID NO: 308480 - DNA, 25 bp, Probe Sequence
tattcctatgcatttctagataaaa

SEQ ID NO: 308481 - DNA, 25 bp, Probe Sequence
tattcctgctcacttgcaagtacaa

SEQ ID NO: 308482 - DNA, 25 bp, Probe Sequence
tattcctgctgccaccaagagacag

SEQ ID NO: 308483 - DNA, 25 bp, Probe Sequence
tattccgctgcattgccaaagtgtc

SEQ ID NO: 308484 - DNA, 25 bp, Probe Sequence
tattcctgatgatctagaacattag

SEQ ID NO: 308485 - DNA, 25 bp, Probe Sequence
tattctcataattcttattctcata

SEQ ID NO: 308486 - DNA, 25 bp, Probe Sequence
tattcattgaattcatgttacatta

SEQ ID NO: 308487 - DNA, 25 bp, Probe Sequence
tattattaagtagttccattcatac

SEQ ID NO: 308488 - DNA, 25 bp, Probe Sequence
tattgtctacagggctcgctatttc

SEQ ID NO: 308489 - DNA, 25 bp, Probe Sequence
tattataaccatagcaagctttgtc

SEQ ID NO: 308490 - DNA, 25 bp, Probe Sequence
tattgtacctcaaatagtgatcttt

SEQ ID NO: 308491 - DNA, 25 bp, Probe Sequence
tattataggcttcaatgttttcatg

SEQ ID NO: 308492 - DNA, 25 bp, Probe Sequence
tattgtcggtatcggagttcttata

SEQ ID NO: 308493 - DNA, 25 bp, Probe Sequence
tattgctacctcctggagatttcca

SEQ ID NO: 308494 - DNA, 25 bp, Probe Sequence
tattgtgacttacttatctgtatcg

SEQ ID NO: 308495 - DNA, 25 bp, Probe Sequence
tattgatggctttcttcagagtcta

SEQ ID NO: 308496 - DNA, 25 bp, Probe Sequence
tattgcagatgtctttagaggctct

SEQ ID NO: 308497 - DNA, 25 bp, Probe Sequence
tattcatgagtattattgaaacctc

SEQ ID NO: 308498 - DNA, 25 bp, Probe Sequence
tattgaggttctttatattcctgcc

SEQ ID NO: 308499 - DNA, 25 bp, Probe Sequence
tttgggaattgtctttgcctgctgc

SEQ ID NO: 308500 - DNA, 25 bp, Probe Sequence
tttggagatgttctcttccctgatc

SEQ ID NO: 308501 - DNA, 25 bp, Probe Sequence
tttgggctgtgggtttcagcttgaa

SEQ ID NO: 308502 - DNA, 25 bp, Probe Sequence
tttgggctctagaattccagtcccc

SEQ ID NO: 308503 - DNA, 25 bp, Probe Sequence
tttggtgtcggtttctattccgcct

SEQ ID NO: 308504 - DNA, 25 bp, Probe Sequence
tttgacctcaatgttatgttcccct

SEQ ID NO: 308505 - DNA, 25 bp, Probe Sequence
ttcctcccaagagtttggactgccc

SEQ ID NO: 308506 - DNA, 25 bp, Probe Sequence
ttgttgccctagagtgggacccagc

SEQ ID NO: 308507 - DNA, 25 bp, Probe Sequence
ttttgccctggcaggtaaccaggac

SEQ ID NO: 308508 - DNA, 25 bp, Probe Sequence
tttgctgcccggagagtagtccgcg

SEQ ID NO: 308509 - DNA, 25 bp, Probe Sequence
tttgtcatcgggttcagctaccccg

SEQ ID NO: 308510 - DNA, 25 bp, Probe Sequence
tattgtgcttcgagtgactgacccc

SEQ ID NO: 308511 - DNA, 25 bp, Probe Sequence
tattgagattccagtggtgacttca

SEQ ID NO: 308512 - DNA, 25 bp, Probe Sequence
tttggatgtccttgtgagtcactct

SEQ ID NO: 308513 - DNA, 25 bp, Probe Sequence
tttgagatcttactgcttgtcactt

SEQ ID NO: 308514 - DNA, 25 bp, Probe Sequence
tttggagtggaggcattgtttttaa

SEQ ID NO: 308515 - DNA, 25 bp, Probe Sequence
tttggaggataggtcaggtgcgtta

SEQ ID NO: 308516 - DNA, 25 bp, Probe Sequence
tttggaggaatttcaagtggtcttg

SEQ ID NO: 308517 - DNA, 25 bp, Probe Sequence
tttgtgtatttcacaatgtcgtgct

SEQ ID NO: 308518 - DNA, 25 bp, Probe Sequence
tttgtgaaagctatcaatgccattc

SEQ ID NO: 308519 - DNA, 25 bp, Probe Sequence
tattgaaacacaaccattctcattt

SEQ ID NO: 308520 - DNA, 25 bp, Probe Sequence
tattgaaacttcgctttttgctaaa

SEQ ID NO: 308521 - DNA, 25 bp, Probe Sequence
tttgaaactgtatcacctttgccaa

SEQ ID NO: 308522 - DNA, 25 bp, Probe Sequence
tttgctactttaccaactggtccca

SEQ ID NO: 308523 - DNA, 25 bp, Probe Sequence
tttgtttttcatgtactgggcaata

SEQ ID NO: 308524 - DNA, 25 bp, Probe Sequence
tttcgtttgaaagtcagctgggcac

SEQ ID NO: 308525 - DNA, 25 bp, Probe Sequence
tttggctcattataatccggtgaac

SEQ ID NO: 308526 - DNA, 25 bp, Probe Sequence
tttggcagtacatcaatgggcgtgg

SEQ ID NO: 308527 - DNA, 25 bp, Probe Sequence
tttggcagacagagaattggagtga

SEQ ID NO: 308528 - DNA, 25 bp, Probe Sequence
tattgagcatattgttaagtgggta

SEQ ID NO: 308529 - DNA, 25 bp, Probe Sequence
tattcgccattgaaatagctgcggc

SEQ ID NO: 308530 - DNA, 25 bp, Probe Sequence
tattcccattctacatactatggaa

SEQ ID NO: 308531 - DNA, 25 bp, Probe Sequence
tttaccattccaaaccaatgagatg

SEQ ID NO: 308532 - DNA, 25 bp, Probe Sequence
tttccctgtctaaactccaggatac

SEQ ID NO: 308533 - DNA, 25 bp, Probe Sequence
tttgcctttcaaaccctcaggtttg

SEQ ID NO: 308534 - DNA, 25 bp, Probe Sequence
tttgtatttaatagcctccaggttc

SEQ ID NO: 308535 - DNA, 25 bp, Probe Sequence
tttgttcctgaatacccagtttaag

SEQ ID NO: 308536 - DNA, 25 bp, Probe Sequence
tattgttgccatcaatgaccccttc

SEQ ID NO: 308537 - DNA, 25 bp, Probe Sequence
tttgtccagttaatacttcctctta

SEQ ID NO: 308538 - DNA, 25 bp, Probe Sequence
tttgggctgcttttagtttctctta

SEQ ID NO: 308539 - DNA, 25 bp, Probe Sequence
tattgtacttgcactagctttttta

SEQ ID NO: 308540 - DNA, 25 bp, Probe Sequence
tattgtaccagcatcatagctttat

SEQ ID NO: 308541 - DNA, 25 bp, Probe Sequence
tattgtaagcacacatgtaattgat

SEQ ID NO: 308542 - DNA, 25 bp, Probe Sequence
tattccgagcattccagtaactttt

SEQ ID NO: 308543 - DNA, 25 bp, Probe Sequence
tattcccacttgtcgtagtcatttc

SEQ ID NO: 308544 - DNA, 25 bp, Probe Sequence
tattgcgccgctagaggtgaaattc

SEQ ID NO: 308545 - DNA, 25 bp, Probe Sequence
tttgcacggtagaaggaacagtcag

SEQ ID NO: 308546 - DNA, 25 bp, Probe Sequence
tttgccgcagtacactatacgatcg

SEQ ID NO: 308547 - DNA, 25 bp, Probe Sequence
tttcctcagtagcccattatttggg

SEQ ID NO: 308548 - DNA, 25 bp, Probe Sequence
tattacacagttccacttattcagg

SEQ ID NO: 308549 - DNA, 25 bp, Probe Sequence
tattacacgttccagtttgtctcgc

SEQ ID NO: 308550 - DNA, 25 bp, Probe Sequence
tattacgtactcagtagtgccctgc

SEQ ID NO: 308551 - DNA, 25 bp, Probe Sequence
tattctcctagtgaatactccctgc

SEQ ID NO: 308552 - DNA, 25 bp, Probe Sequence
tattctctctcagaaatcaatggca

SEQ ID NO: 308553 - DNA, 25 bp, Probe Sequence
tttgctcccaggcaacactgagctg

SEQ ID NO: 308554 - DNA, 25 bp, Probe Sequence
tttgcctggcatcctcaaacgaggc

SEQ ID NO: 308555 - DNA, 25 bp, Probe Sequence
ttttgctggaggccgcaaccaggcc

SEQ ID NO: 308556 - DNA, 25 bp, Probe Sequence
tttgtggcagagtacgagcccgtgc

SEQ ID NO: 308557 - DNA, 25 bp, Probe Sequence
tttggtgctcagaatgtagctcgga

SEQ ID NO: 308558 - DNA, 25 bp, Probe Sequence
ttacctgctcagatgatagggtaaa

SEQ ID NO: 308559 - DNA, 25 bp, Probe Sequence
tttccttcgggataggtacaatgtc

SEQ ID NO: 308560 - DNA, 25 bp, Probe Sequence
tttcctataggtgacgggcagaatt

SEQ ID NO: 308561 - DNA, 25 bp, Probe Sequence
tttcccgagtcagagcggccagaga

SEQ ID NO: 308562 - DNA, 25 bp, Probe Sequence
ttttccgaggaaagcgaacattata

SEQ ID NO: 308563 - DNA, 25 bp, Probe Sequence
tttgtcgtgcctacaatcaagaatt

SEQ ID NO: 308564 - DNA, 25 bp, Probe Sequence
tttgactgtccacatcacaggattt

SEQ ID NO: 308565 - DNA, 25 bp, Probe Sequence
tttgacttgcacctataaaattaat

SEQ ID NO: 308566 - DNA, 25 bp, Probe Sequence
tttgatttgaccaccaagatgtaat

SEQ ID NO: 308567 - DNA, 25 bp, Probe Sequence
tttgaatagcctactcccaagtaag

SEQ ID NO: 308568 - DNA, 25 bp, Probe Sequence
tttgcaggctgcttcaggattacat

SEQ ID NO: 308569 - DNA, 25 bp, Probe Sequence
tttgcagcgagcacatgaggaagct

SEQ ID NO: 308570 - DNA, 25 bp, Probe Sequence
tattcagaggcagatactaaattaa

SEQ ID NO: 308571 - DNA, 25 bp, Probe Sequence
tattcatttgaggatgtcttataaa

SEQ ID NO: 308572 - DNA, 25 bp, Probe Sequence
tattacttgagttgattgattatta

SEQ ID NO: 308573 - DNA, 25 bp, Probe Sequence
tattactttgtacgtgattgtctta

SEQ ID NO: 308574 - DNA, 25 bp, Probe Sequence
tattctctctttacgcttagttatc

SEQ ID NO: 308575 - DNA, 25 bp, Probe Sequence
tattcattccttattgtatgttgtc

SEQ ID NO: 308576 - DNA, 25 bp, Probe Sequence
tattgcttcttgtgttttactgtca

SEQ ID NO: 308577 - DNA, 25 bp, Probe Sequence
tattgcttcttgtgttttactgtca

SEQ ID NO: 308578 - DNA, 25 bp, Probe Sequence
tttgagacctttcttgtaatgtagt

SEQ ID NO: 308579 - DNA, 25 bp, Probe Sequence
ttggagaccgttattctaactcagg

SEQ ID NO: 308580 - DNA, 25 bp, Probe Sequence
ttgggaccgtgagttcctagagctt

SEQ ID NO: 308581 - DNA, 25 bp, Probe Sequence
tattggaaggtagagcccactgctc

SEQ ID NO: 308582 - DNA, 25 bp, Probe Sequence
tttggtgggagagacgcgatcgccg

SEQ ID NO: 308583 - DNA, 25 bp, Probe Sequence
tttggcccgaatgagggagcctccc

SEQ ID NO: 308584 - DNA, 25 bp, Probe Sequence
tttggcaccaaatcacgggacttcc

SEQ ID NO: 308585 - DNA, 25 bp, Probe Sequence
tttggcacctatctacgggactttc

SEQ ID NO: 308586 - DNA, 25 bp, Probe Sequence
tttgttcctaatgacgtggacttta

SEQ ID NO: 308587 - DNA, 25 bp, Probe Sequence
tttggtcctggataatggtgagttt

SEQ ID NO: 308588 - DNA, 25 bp, Probe Sequence
tttttgtatggtgaagggaggcctt

SEQ ID NO: 308589 - DNA, 25 bp, Probe Sequence
tttgtttagactgaaggaagacgtt

SEQ ID NO: 308590 - DNA, 25 bp, Probe Sequence
tttgacttcaagggacggaaacatc

SEQ ID NO: 308591 - DNA, 25 bp, Probe Sequence
tttacttgagacagacgaaccttga

SEQ ID NO: 308592 - DNA, 25 bp, Probe Sequence
tttaaggaggcgctggcaagcccga

SEQ ID NO: 308593 - DNA, 25 bp, Probe Sequence
tattctagagacgggttgcaatgac

SEQ ID NO: 308594 - DNA, 25 bp, Probe Sequence
tattctgtagacactttcaatgggg

SEQ ID NO: 308595 - DNA, 25 bp, Probe Sequence
tattctgtgtgtagacattgtattc

SEQ ID NO: 308596 - DNA, 25 bp, Probe Sequence
tattctgcgttagcatctggtttgc

SEQ ID NO: 308597 - DNA, 25 bp, Probe Sequence
tattctcgtatctgccatgagttca

SEQ ID NO: 308598 - DNA, 25 bp, Probe Sequence
tattctggatactatccgaggtaat

SEQ ID NO: 308599 - DNA, 25 bp, Probe Sequence
tttggcagtacaatctaccgtaatt

SEQ ID NO: 308600 - DNA, 25 bp, Probe Sequence
tttgaagtacttgggccaggatttc

SEQ ID NO: 308601 - DNA, 25 bp, Probe Sequence
tttaattacattgggagcagttcat

SEQ ID NO: 308602 - DNA, 25 bp, Probe Sequence
tttcaattcaatacgcgggatagcc

SEQ ID NO: 308603 - DNA, 25 bp, Probe Sequence
tattcaatagaaatcaaggtgttca

SEQ ID NO: 308604 - DNA, 25 bp, Probe Sequence
tattcatttgtatccaaggtgctga

SEQ ID NO: 308605 - DNA, 25 bp, Probe Sequence
tattcatttgtatccaaggtgctga

SEQ ID NO: 308606 - DNA, 25 bp, Probe Sequence
tattctatttgtatgatacactgta

SEQ ID NO: 308607 - DNA, 25 bp, Probe Sequence
tattctgtttattatgacaaatgaa

SEQ ID NO: 308608 - DNA, 25 bp, Probe Sequence
tattcgttatacggaagatgatgaa

SEQ ID NO: 308609 - DNA, 25 bp, Probe Sequence
tattgctgattatacttgagtggaa

SEQ ID NO: 308610 - DNA, 25 bp, Probe Sequence
tattgagacatattactggaagtaa

SEQ ID NO: 308611 - DNA, 25 bp, Probe Sequence
ttgtggaagctgtcctggaactccg

SEQ ID NO: 308612 - DNA, 25 bp, Probe Sequence
tttgatgaacgagcccacagcctcg

SEQ ID NO: 308613 - DNA, 25 bp, Probe Sequence
tttggcaaaatccccagagccaagg

SEQ ID NO: 308614 - DNA, 25 bp, Probe Sequence
tttggaaaatgctgccagtgctcaa

SEQ ID NO: 308615 - DNA, 25 bp, Probe Sequence
tttgtagataactgcgaggacacta

SEQ ID NO: 308616 - DNA, 25 bp, Probe Sequence
tttgtagcaacctggatggagttgg

SEQ ID NO: 308617 - DNA, 25 bp, Probe Sequence
tttgtcccacctgggagaatgtgcc

SEQ ID NO: 308618 - DNA, 25 bp, Probe Sequence
tttgtccccctggatagaacgtgca

SEQ ID NO: 308619 - DNA, 25 bp, Probe Sequence
tttgacctccctagaagacaccggg

SEQ ID NO: 308620 - DNA, 25 bp, Probe Sequence
ttaggcatcctctggaaaaccggcc

SEQ ID NO: 308621 - DNA, 25 bp, Probe Sequence
ttagtcaacgtagcaaaaccatggg

SEQ ID NO: 308622 - DNA, 25 bp, Probe Sequence
ttaccaccgttgacaccaaaaggcg

SEQ ID NO: 308623 - DNA, 25 bp, Probe Sequence
ttgacccggacgacacctataatga

SEQ ID NO: 308624 - DNA, 25 bp, Probe Sequence
ttagtacgtggagtcaccttacaga

SEQ ID NO: 308625 - DNA, 25 bp, Probe Sequence
tttgtacattgatggacacttaaga

SEQ ID NO: 308626 - DNA, 25 bp, Probe Sequence
tttgttcatgtcagtgagagcttcc

SEQ ID NO: 308627 - DNA, 25 bp, Probe Sequence
tttgttctgtaaatgctgcgttcct

SEQ ID NO: 308628 - DNA, 25 bp, Probe Sequence
tttgtatcttagacgacctgtccag

SEQ ID NO: 308629 - DNA, 25 bp, Probe Sequence
tttgattttattcgcaccattgcgg

SEQ ID NO: 308630 - DNA, 25 bp, Probe Sequence
tattcagtttacatgcattattggt

SEQ ID NO: 308631 - DNA, 25 bp, Probe Sequence
tattctctttactgctggattatgt

SEQ ID NO: 308632 - DNA, 25 bp, Probe Sequence
tattcatcatttttaaggcttatct

SEQ ID NO: 308633 - DNA, 25 bp, Probe Sequence
tattcatttctgtctaatttcactc

SEQ ID NO: 308634 - DNA, 25 bp, Probe Sequence
accaggcctgaccaacatacatggc

SEQ ID NO: 308635 - DNA, 25 bp, Probe Sequence
tattcagcccatcacgctgtggttt

SEQ ID NO: 308636 - DNA, 25 bp, Probe Sequence
tattctcccatgaacgttcttgtct

SEQ ID NO: 308637 - DNA, 25 bp, Probe Sequence
tattctgcaggtaagtgttttgact

SEQ ID NO: 308638 - DNA, 25 bp, Probe Sequence
tattccagtatttgtgtgtttgatt

SEQ ID NO: 308639 - DNA, 25 bp, Probe Sequence
tattccgtattgttgtcttccattc

SEQ ID NO: 308640 - DNA, 25 bp, Probe Sequence
tttcacgtaagtccacatatacttc

SEQ ID NO: 308641 - DNA, 25 bp, Probe Sequence
tttccttacagtccattaatttgac

SEQ ID NO: 308642 - DNA, 25 bp, Probe Sequence
tttgtcccaagtcttatttgctgac

SEQ ID NO: 308643 - DNA, 25 bp, Probe Sequence
tttgttccacgtcaagttctggcct

SEQ ID NO: 308644 - DNA, 25 bp, Probe Sequence
ttggttcccagggacagtcagggcc

SEQ ID NO: 308645 - DNA, 25 bp, Probe Sequence
tttgtatctccggtaagtagatgag

SEQ ID NO: 308646 - DNA, 25 bp, Probe Sequence
tttggtaccgaaaacagcagtggac

SEQ ID NO: 308647 - DNA, 25 bp, Probe Sequence
tttctggcatcctaaatcaacggga

SEQ ID NO: 308648 - DNA, 25 bp, Probe Sequence
tttggcacgcgaaagtcaacgggac

SEQ ID NO: 308649 - DNA, 25 bp, Probe Sequence
tttgccccgtcatgccaaagaggaa

SEQ ID NO: 308650 - DNA, 25 bp, Probe Sequence
tttgaccacctcagtgctcaagaac

SEQ ID NO: 308651 - DNA, 25 bp, Probe Sequence
tttgtggatccctccaccagaacaa

SEQ ID NO: 308652 - DNA, 25 bp, Probe Sequence
tttgtggactctgcacaccgtatga

SEQ ID NO: 308653 - DNA, 25 bp, Probe Sequence
tattgctggagccccaacacagtac

SEQ ID NO: 308654 - DNA, 25 bp, Probe Sequence
tattgatggcgccccatgtgcaaga

SEQ ID NO: 308655 - DNA, 25 bp, Probe Sequence
tattgagagctctgctatgccactg

SEQ ID NO: 308656 - DNA, 25 bp, Probe Sequence
tattcatgagtccgtatcaacgcta

SEQ ID NO: 308657 - DNA, 25 bp, Probe Sequence
tattcagagactcgagcacagcacc

SEQ ID NO: 308658 - DNA, 25 bp, Probe Sequence
tattgaagcattcatcagcagcctc

SEQ ID NO: 308659 - DNA, 25 bp, Probe Sequence
tattcactgtcttatctgcagaaat

SEQ ID NO: 308660 - DNA, 25 bp, Probe Sequence
tattcattgtctacctgctaagtca

SEQ ID NO: 308661 - DNA, 25 bp, Probe Sequence
tattcattgtctacctgctaagtca

SEQ ID NO: 308662 - DNA, 25 bp, Probe Sequence
tattctttccatttgctatcatgtc

SEQ ID NO: 308663 - DNA, 25 bp, Probe Sequence
tattcattccattattccatatgac

SEQ ID NO: 308664 - DNA, 25 bp, Probe Sequence
tattcatataatttactctagtcca

SEQ ID NO: 308665 - DNA, 25 bp, Probe Sequence
tattgcaatgacagaacttccacca

SEQ ID NO: 308666 - DNA, 25 bp, Probe Sequence
tattcagagcacagtgatgttagac

SEQ ID NO: 308667 - DNA, 25 bp, Probe Sequence
tattcagagcatctgtctttgcagc

SEQ ID NO: 308668 - DNA, 25 bp, Probe Sequence
tttgcaagcagcctgttcatcgggg

SEQ ID NO: 308669 - DNA, 25 bp, Probe Sequence
tttgggcagtgccttttggggtcca

SEQ ID NO: 308670 - DNA, 25 bp, Probe Sequence
ttatggtgcagtaattttccgggga

SEQ ID NO: 308671 - DNA, 25 bp, Probe Sequence
tattgtgcctgaaatttcccgagag

SEQ ID NO: 308672 - DNA, 25 bp, Probe Sequence
tttgtgcactgaggtgatgtcacca

SEQ ID NO: 308673 - DNA, 25 bp, Probe Sequence
tttgatgacatgtcctgcatcttct

SEQ ID NO: 308674 - DNA, 25 bp, Probe Sequence
tttgccacaccaactaaactgacct

SEQ ID NO: 308675 - DNA, 25 bp, Probe Sequence
tattgccaactttgttaagtggctc

SEQ ID NO: 308676 - DNA, 25 bp, Probe Sequence
tttggcaaccattgttccaggtccc

SEQ ID NO: 308677 - DNA, 25 bp, Probe Sequence
tttgagcgacctttgggcaggtttc

SEQ ID NO: 308678 - DNA, 25 bp, Probe Sequence
tttggcacccttatatatgttttcc

SEQ ID NO: 308679 - DNA, 25 bp, Probe Sequence
tttcgacctctatttaagtattctt

SEQ ID NO: 308680 - DNA, 25 bp, Probe Sequence
tattgctcactgcctatttaatgta

SEQ ID NO: 308681 - DNA, 25 bp, Probe Sequence
tattgcataccccatcattaaaaga

SEQ ID NO: 308682 - DNA, 25 bp, Probe Sequence
tattgtcctgccctctgatgagaaa

SEQ ID NO: 308683 - DNA, 25 bp, Probe Sequence
tttgtgctgtggcctttgctaaaaa

SEQ ID NO: 308684 - DNA, 25 bp, Probe Sequence
tattggtgattgcctgtggtaggaa

SEQ ID NO: 308685 - DNA, 25 bp, Probe Sequence
tttgccagtctcatgggtagatagt

SEQ ID NO: 308686 - DNA, 25 bp, Probe Sequence
tttgagcttctcattgtgtagaatt

SEQ ID NO: 308687 - DNA, 25 bp, Probe Sequence
tttgtctagcatgtttgtttaatcc

SEQ ID NO: 308688 - DNA, 25 bp, Probe Sequence
tttgtgttgctggtggttttatatt

SEQ ID NO: 308689 - DNA, 25 bp, Probe Sequence
tttggtacatctaagttttcactta

SEQ ID NO: 308690 - DNA, 25 bp, Probe Sequence
tttggtagattttttttctgacaat

SEQ ID NO: 308691 - DNA, 25 bp, Probe Sequence
tttggtgccttacttttatcttaat

SEQ ID NO: 308692 - DNA, 25 bp, Probe Sequence
tttgaggccatgcttaatatattta

SEQ ID NO: 308693 - DNA, 25 bp, Probe Sequence
tttggcactatctttatattattaa

SEQ ID NO: 308694 - DNA, 25 bp, Probe Sequence
tttggccttctctttacagactgaa

SEQ ID NO: 308695 - DNA, 25 bp, Probe Sequence
tttgggtgtttgttacaggcagaat

SEQ ID NO: 308696 - DNA, 25 bp, Probe Sequence
tttggggacccattataggcaataa

SEQ ID NO: 308697 - DNA, 25 bp, Probe Sequence
tttggagtgtcagcagctatagtga

SEQ ID NO: 308698 - DNA, 25 bp, Probe Sequence
tttggtcatggggactgatagaagg

SEQ ID NO: 308699 - DNA, 25 bp, Probe Sequence
tattcccatgggtcacaggagacag

SEQ ID NO: 308700 - DNA, 25 bp, Probe Sequence
tattcccatgggtcacaggagacag

SEQ ID NO: 308701 - DNA, 25 bp, Probe Sequence
tattgccaaacgacacaggaaattt

SEQ ID NO: 308702 - DNA, 25 bp, Probe Sequence
tattcccacatctacatcagtgaaa

SEQ ID NO: 308703 - DNA, 25 bp, Probe Sequence
tattctccaggatcatatgttagag

SEQ ID NO: 308704 - DNA, 25 bp, Probe Sequence
tattccagggtttatgtgtcagggt

SEQ ID NO: 308705 - DNA, 25 bp, Probe Sequence
ttgttaggggcgcagcgtcaggtgt

SEQ ID NO: 308706 - DNA, 25 bp, Probe Sequence
tttcatttggaggataggtcaggtg

SEQ ID NO: 308707 - DNA, 25 bp, Probe Sequence
tttcttagttgtatggccaggcagt

SEQ ID NO: 308708 - DNA, 25 bp, Probe Sequence
ttttttggtttattctcaggagttg

SEQ ID NO: 308709 - DNA, 25 bp, Probe Sequence
ttttactaggtttttatgttgattg

SEQ ID NO: 308710 - DNA, 25 bp, Probe Sequence
tttgatcctagggtgctccttttgt

SEQ ID NO: 308711 - DNA, 25 bp, Probe Sequence
tttgctcttagggtactcaatttta

SEQ ID NO: 308712 - DNA, 25 bp, Probe Sequence
tttgcttcactgcttttaatactta

SEQ ID NO: 308713 - DNA, 25 bp, Probe Sequence
tattgaacctctttattaaacctct

SEQ ID NO: 308714 - DNA, 25 bp, Probe Sequence
tttgtatccctcttttgacaaccac

SEQ ID NO: 308715 - DNA, 25 bp, Probe Sequence
tttgagttcagttgttataaaccat

SEQ ID NO: 308716 - DNA, 25 bp, Probe Sequence
ttttgaatcgtccttataacagctt

SEQ ID NO: 308717 - DNA, 25 bp, Probe Sequence
tttgggtcctgccgtataatctgtt

SEQ ID NO: 308718 - DNA, 25 bp, Probe Sequence
tattgggctcagtgctgtaggtctg

SEQ ID NO: 308719 - DNA, 25 bp, Probe Sequence
tttgaagctcaggtgtctcacgtct

SEQ ID NO: 308720 - DNA, 25 bp, Probe Sequence
tttgaggccaggttcttccatttgg

SEQ ID NO: 308721 - DNA, 25 bp, Probe Sequence
ttgaggtgaaggacgccccatttag

SEQ ID NO: 308722 - DNA, 25 bp, Probe Sequence
ttcagcgtggggcgcccacaatttg

SEQ ID NO: 308723 - DNA, 25 bp, Probe Sequence
ttatcgttggtggagccacgcgcac

SEQ ID NO: 308724 - DNA, 25 bp, Probe Sequence
tttcagctttgggaccaggctgccc

SEQ ID NO: 308725 - DNA, 25 bp, Probe Sequence
tttggataataaacctggctcagcc

SEQ ID NO: 308726 - DNA, 25 bp, Probe Sequence
tttggattcaagagcactgtgtatg

SEQ ID NO: 308727 - DNA, 25 bp, Probe Sequence
tttgatgatcaaggacgggagtatg

SEQ ID NO: 308728 - DNA, 25 bp, Probe Sequence
tattgattcagagattggccaatat

SEQ ID NO: 308729 - DNA, 25 bp, Probe Sequence
tattgttcgcgtcatgccagcaaat

SEQ ID NO: 308730 - DNA, 25 bp, Probe Sequence
tattgttcagttcatccagattata

SEQ ID NO: 308731 - DNA, 25 bp, Probe Sequence
tattgctaagtattattccattata

SEQ ID NO: 308732 - DNA, 25 bp, Probe Sequence
tattctatgcattgtttgtctttta

SEQ ID NO: 308733 - DNA, 25 bp, Probe Sequence
tattcgtcctgtaatctgtttctag

SEQ ID NO: 308734 - DNA, 25 bp, Probe Sequence
tattcgtatatattcactgttgtta

SEQ ID NO: 308735 - DNA, 25 bp, Probe Sequence
tattcgtatatattcactgttgtta

SEQ ID NO: 308736 - DNA, 25 bp, Probe Sequence
tattccttaatccctatctgtacaa

SEQ ID NO: 308737 - DNA, 25 bp, Probe Sequence
tattgactttatgttgtatgattcc

SEQ ID NO: 308738 - DNA, 25 bp, Probe Sequence
tattccttctaacgtgtgagatgtc

SEQ ID NO: 308739 - DNA, 25 bp, Probe Sequence
tttggcattgtccctctggaagcca

SEQ ID NO: 308740 - DNA, 25 bp, Probe Sequence
tttggcaattcttcttctcaagcac

SEQ ID NO: 308741 - DNA, 25 bp, Probe Sequence
tttgatgcgttttctttgcttcact

SEQ ID NO: 308742 - DNA, 25 bp, Probe Sequence
tattgagtgctgtgactcttcctca

SEQ ID NO: 308743 - DNA, 25 bp, Probe Sequence
tttgagtcaaggggcttcactgcct

SEQ ID NO: 308744 - DNA, 25 bp, Probe Sequence
tttgggcaagccaagtgccctctct

SEQ ID NO: 308745 - DNA, 25 bp, Probe Sequence
tattggtgaatcccagagaccgccg

SEQ ID NO: 308746 - DNA, 25 bp, Probe Sequence
tattggtgaatcccagagaccgccg

SEQ ID NO: 308747 - DNA, 25 bp, Probe Sequence
tttggggcatggtggcacgtgcctg

SEQ ID NO: 308748 - DNA, 25 bp, Probe Sequence
tttggggattgcttacatcgctgtt

SEQ ID NO: 308749 - DNA, 25 bp, Probe Sequence
tttggtaactgcatacttgttgttt

SEQ ID NO: 308750 - DNA, 25 bp, Probe Sequence
tattgatgtatagttttttttgttt

SEQ ID NO: 308751 - DNA, 25 bp, Probe Sequence
tattgttgcttattgttttgtttat

SEQ ID NO: 308752 - DNA, 25 bp, Probe Sequence
tattccttgatattttttctttctt

SEQ ID NO: 308753 - DNA, 25 bp, Probe Sequence
tattccttgtctgtactttagtatt

SEQ ID NO: 308754 - DNA, 25 bp, Probe Sequence
tattccttgtctgtactttagtatt

SEQ ID NO: 308755 - DNA, 25 bp, Probe Sequence
tattcctacttcataacttttatct

SEQ ID NO: 308756 - DNA, 25 bp, Probe Sequence
tattcccatttttaagcatttgctt

SEQ ID NO: 308757 - DNA, 25 bp, Probe Sequence
tattcccttcttccaaatatgactt

SEQ ID NO: 308758 - DNA, 25 bp, Probe Sequence
tattcctttattaaaatcttcctca

SEQ ID NO: 308759 - DNA, 25 bp, Probe Sequence
tattgctcagttaatcacagcaaca

SEQ ID NO: 308760 - DNA, 25 bp, Probe Sequence
tattgctgtgtgcttccagccacag

SEQ ID NO: 308761 - DNA, 25 bp, Probe Sequence
tattctggcagttttcatccacaga

SEQ ID NO: 308762 - DNA, 25 bp, Probe Sequence
tttctggattaatgcagccacacac

SEQ ID NO: 308763 - DNA, 25 bp, Probe Sequence
tttggcatcatgttgaagcaccgaa

SEQ ID NO: 308764 - DNA, 25 bp, Probe Sequence
tttggatgcaggccttgcccagaac

SEQ ID NO: 308765 - DNA, 25 bp, Probe Sequence
tattggtcaggctggtctcgaactc

SEQ ID NO: 308766 - DNA, 25 bp, Probe Sequence
tattggtcaggctggtctcgaactc

SEQ ID NO: 308767 - DNA, 25 bp, Probe Sequence
tttctgcttgagtatggtgttaact

SEQ ID NO: 308768 - DNA, 25 bp, Probe Sequence
tattcctattactgtgatcaaaatt

SEQ ID NO: 308769 - DNA, 25 bp, Probe Sequence
tattcctttgagtgtatacccagta

SEQ ID NO: 308770 - DNA, 25 bp, Probe Sequence
tattggtcctggtggtacagccagt

SEQ ID NO: 308771 - DNA, 25 bp, Probe Sequence
tttggacatcggtggtgctgaccag

SEQ ID NO: 308772 - DNA, 25 bp, Probe Sequence
tttgctacaaagggccggacgcagc

SEQ ID NO: 308773 - DNA, 25 bp, Probe Sequence
tttgcaaaaactgtcaggagggacc

SEQ ID NO: 308774 - DNA, 25 bp, Probe Sequence
tttgaaagttgccttctgaaagggc

SEQ ID NO: 308775 - DNA, 25 bp, Probe Sequence
tattgaacaattctacatcaacagg

SEQ ID NO: 308776 - DNA, 25 bp, Probe Sequence
tattggacaataaaagcaccatcac

SEQ ID NO: 308777 - DNA, 25 bp, Probe Sequence
tattgtgacaactctagacctgcct

SEQ ID NO: 308778 - DNA, 25 bp, Probe Sequence
tattgaccataactctgtgcacttg

SEQ ID NO: 308779 - DNA, 25 bp, Probe Sequence
tttgacaagaagaagctgatctctg

SEQ ID NO: 308780 - DNA, 25 bp, Probe Sequence
tattgtctagcatagttcttaggtg

SEQ ID NO: 308781 - DNA, 25 bp, Probe Sequence
tttgttcacacatgtctttaggtgg

SEQ ID NO: 308782 - DNA, 25 bp, Probe Sequence
tttgtgtgtgactgtttctcatgtt

SEQ ID NO: 308783 - DNA, 25 bp, Probe Sequence
tattgtgctgtgtctggtcctaagt

SEQ ID NO: 308784 - DNA, 25 bp, Probe Sequence
tttggctggctccagacctaggttt

SEQ ID NO: 308785 - DNA, 25 bp, Probe Sequence
tttgtgtgtgtccaacagttgaatt

SEQ ID NO: 308786 - DNA, 25 bp, Probe Sequence
tttgaatggcagcatgatcatgtaa

SEQ ID NO: 308787 - DNA, 25 bp, Probe Sequence
tttcagctggctggacacagtcaca

SEQ ID NO: 308788 - DNA, 25 bp, Probe Sequence
tttgactggtctggcaacatcatcc

SEQ ID NO: 308789 - DNA, 25 bp, Probe Sequence
tttgactctaattcagcctatcgcc

SEQ ID NO: 308790 - DNA, 25 bp, Probe Sequence
tttgattcttaaccccatggactcc

SEQ ID NO: 308791 - DNA, 25 bp, Probe Sequence
tttgtgacttcaagagcctctggca

SEQ ID NO: 308792 - DNA, 25 bp, Probe Sequence
tattgggctccaaacttctgggctt

SEQ ID NO: 308793 - DNA, 25 bp, Probe Sequence
ttttggtccagttcttgtggttctg

SEQ ID NO: 308794 - DNA, 25 bp, Probe Sequence
tttgttgttcgtttgtggtttctgg

SEQ ID NO: 308795 - DNA, 25 bp, Probe Sequence
tattgtagttcattttgttaattgg

SEQ ID NO: 308796 - DNA, 25 bp, Probe Sequence
tattgtattctctagtaataaattt

SEQ ID NO: 308797 - DNA, 25 bp, Probe Sequence
tattgtttctctactaagaactctt

SEQ ID NO: 308798 - DNA, 25 bp, Probe Sequence
tattgctggtattagctaaaacctt

SEQ ID NO: 308799 - DNA, 25 bp, Probe Sequence
tttggggataagtcattcaactcta

SEQ ID NO: 308800 - DNA, 25 bp, Probe Sequence
tattgtcaaataggtttcatactct

SEQ ID NO: 308801 - DNA, 25 bp, Probe Sequence
tattgtatagtagctttcagaccat

SEQ ID NO: 308802 - DNA, 25 bp, Probe Sequence
tttgtatcaatctctgactgcaacc

SEQ ID NO: 308803 - DNA, 25 bp, Probe Sequence
tttgcatacttacctagtgaaactt

SEQ ID NO: 308804 - DNA, 25 bp, Probe Sequence
tttgaaagcatactgtgaaaaactt

SEQ ID NO: 308805 - DNA, 25 bp, Probe Sequence
tttgaacaatgacttgaccccacaa

SEQ ID NO: 308806 - DNA, 25 bp, Probe Sequence
tttgaacaatgacttgaccccacaa

SEQ ID NO: 308807 - DNA, 25 bp, Probe Sequence
tttggcaaagaattcaccccaccag

SEQ ID NO: 308808 - DNA, 25 bp, Probe Sequence
tttggcaaagaattcaccccaccag

SEQ ID NO: 308809 - DNA, 25 bp, Probe Sequence
tttgtcataaatatcttcctaccac

SEQ ID NO: 308810 - DNA, 25 bp, Probe Sequence
tattgtcttaaatttcagttacaca

SEQ ID NO: 308811 - DNA, 25 bp, Probe Sequence
tttgttgttactttagttcatcaga

SEQ ID NO: 308812 - DNA, 25 bp, Probe Sequence
ttgtgggaaacttatatgttcaggt

SEQ ID NO: 308813 - DNA, 25 bp, Probe Sequence
tttggtaaatcccatctttcagaag

SEQ ID NO: 308814 - DNA, 25 bp, Probe Sequence
tttggttttccactattctctattg

SEQ ID NO: 308815 - DNA, 25 bp, Probe Sequence
tattgatgtgtttgtcacctcccta

SEQ ID NO: 308816 - DNA, 25 bp, Probe Sequence
tttggttgtgcagttccttggctac

SEQ ID NO: 308817 - DNA, 25 bp, Probe Sequence
tttggttgtggcatgacatctgggt

SEQ ID NO: 308818 - DNA, 25 bp, Probe Sequence
tttgtgcttgtgaatagacactgca

SEQ ID NO: 308819 - DNA, 25 bp, Probe Sequence
tattgatgtgactttctgacactga

SEQ ID NO: 308820 - DNA, 25 bp, Probe Sequence
tattgttgacatgaatctatgcgtg

SEQ ID NO: 308821 - DNA, 25 bp, Probe Sequence
tttgtggacagcgagaccatgcctc

SEQ ID NO: 308822 - DNA, 25 bp, Probe Sequence
tattgtcaacatcgagacccctgtg

SEQ ID NO: 308823 - DNA, 25 bp, Probe Sequence
tttgcaagagcgcagaccaccgcgc

SEQ ID NO: 308824 - DNA, 25 bp, Probe Sequence
tttcctgcatggtcagactacctcg

SEQ ID NO: 308825 - DNA, 25 bp, Probe Sequence
tttgcaggagttagccgaccacgag

SEQ ID NO: 308826 - DNA, 25 bp, Probe Sequence
tttgtggagttagactgcccgcatt

SEQ ID NO: 308827 - DNA, 25 bp, Probe Sequence
ttgggacgaacagagctctcccttg

SEQ ID NO: 308828 - DNA, 25 bp, Probe Sequence
tttgctacgaagaaagactcctttc

SEQ ID NO: 308829 - DNA, 25 bp, Probe Sequence
tttctgggggcttataccctgtgtc

SEQ ID NO: 308830 - DNA, 25 bp, Probe Sequence
tttcttagttgctagactccctgga

SEQ ID NO: 308831 - DNA, 25 bp, Probe Sequence
tttaacagggtatgctgcctctgta

SEQ ID NO: 308832 - DNA, 25 bp, Probe Sequence
tattggacggtttctagcctctgag

SEQ ID NO: 308833 - DNA, 25 bp, Probe Sequence
tttggactacgttcttggctccaga

SEQ ID NO: 308834 - DNA, 25 bp, Probe Sequence
tttggggagcggtctatgtgaccaa

SEQ ID NO: 308835 - DNA, 25 bp, Probe Sequence
tttgtgagagtgccccgggaccaat

SEQ ID NO: 308836 - DNA, 25 bp, Probe Sequence
tttggagcagggcacgggactggca

SEQ ID NO: 308837 - DNA, 25 bp, Probe Sequence
ttattgagctggctccgggacttgg

SEQ ID NO: 308838 - DNA, 25 bp, Probe Sequence
tttctggctggttcagggggtcagt

SEQ ID NO: 308839 - DNA, 25 bp, Probe Sequence
tttgctggctataagcggggtctcc

SEQ ID NO: 308840 - DNA, 25 bp, Probe Sequence
tttgtcgtcagggatggggtgctcc

SEQ ID NO: 308841 - DNA, 25 bp, Probe Sequence
tttgttgctcagcaaggggctctgc

SEQ ID NO: 308842 - DNA, 25 bp, Probe Sequence
tttgtgtctatggttgtgggtctgg

SEQ ID NO: 308843 - DNA, 25 bp, Probe Sequence
tttgtatccaaggtgctgaatcttg

SEQ ID NO: 308844 - DNA, 25 bp, Probe Sequence
tttgtatcacaaatcttaacttgaa

SEQ ID NO: 308845 - DNA, 25 bp, Probe Sequence
tttgtatcaactttgtgagtaataa

SEQ ID NO: 308846 - DNA, 25 bp, Probe Sequence
tttgatacctctttatgacttaaca

SEQ ID NO: 308847 - DNA, 25 bp, Probe Sequence
tattgtaacctttcaacctgaaaat

SEQ ID NO: 308848 - DNA, 25 bp, Probe Sequence
tattccaacctttaactctgtatca

SEQ ID NO: 308849 - DNA, 25 bp, Probe Sequence
tttgcaaaccttcaagctgtgtaat

SEQ ID NO: 308850 - DNA, 25 bp, Probe Sequence
tttgcaataccaaatatacaggttt

SEQ ID NO: 308851 - DNA, 25 bp, Probe Sequence
tattggctactaaatggcccctgtt

SEQ ID NO: 308852 - DNA, 25 bp, Probe Sequence
tttgggattatatgcacccctttcc

SEQ ID NO: 308853 - DNA, 25 bp, Probe Sequence
tttgtatgaatatccacctccttta

SEQ ID NO: 308854 - DNA, 25 bp, Probe Sequence
tttgaatattcagctacgacagttt

SEQ ID NO: 308855 - DNA, 25 bp, Probe Sequence
tttgccatcttagcctaaagtattg

SEQ ID NO: 308856 - DNA, 25 bp, Probe Sequence
tttgctctcctagggacaagtgtaa

SEQ ID NO: 308857 - DNA, 25 bp, Probe Sequence
tttgctcatcctgctgacagcacaa

SEQ ID NO: 308858 - DNA, 25 bp, Probe Sequence
tattgtcagcctgcatcaccagaga

SEQ ID NO: 308859 - DNA, 25 bp, Probe Sequence
tattgtcatgaactatatccgtaac

SEQ ID NO: 308860 - DNA, 25 bp, Probe Sequence
tttactgaactctacagggaagcat

SEQ ID NO: 308861 - DNA, 25 bp, Probe Sequence
ttatcacagtattctcagggtgaaa

SEQ ID NO: 308862 - DNA, 25 bp, Probe Sequence
tttggatgtatatcagtggagaaaa

SEQ ID NO: 308863 - DNA, 25 bp, Probe Sequence
tattgggtgatgttcagtatggaaa

SEQ ID NO: 308864 - DNA, 25 bp, Probe Sequence
tattgggtgatgttcagtatggaaa

SEQ ID NO: 308865 - DNA, 25 bp, Probe Sequence
tattggtggcttaagctttgaaacc

SEQ ID NO: 308866 - DNA, 25 bp, Probe Sequence
tattgttggtcaaagtattggtact

SEQ ID NO: 308867 - DNA, 25 bp, Probe Sequence
tattgtctgtccatatgtatttgta

SEQ ID NO: 308868 - DNA, 25 bp, Probe Sequence
tattgtctgtccatatgtatttgta

SEQ ID NO: 308869 - DNA, 25 bp, Probe Sequence
tattgtatgtttactgtgatcttaa

SEQ ID NO: 308870 - DNA, 25 bp, Probe Sequence
tttgttattttccatgcacaataag

SEQ ID NO: 308871 - DNA, 25 bp, Probe Sequence
tttgattaaacctagacgcattagg

SEQ ID NO: 308872 - DNA, 25 bp, Probe Sequence
tttggtttctccggacagcagtagg

SEQ ID NO: 308873 - DNA, 25 bp, Probe Sequence
tttctttcctcctgaaactagtctc

SEQ ID NO: 308874 - DNA, 25 bp, Probe Sequence
tttgttcccacctgattttgtgaca

SEQ ID NO: 308875 - DNA, 25 bp, Probe Sequence
ttatttctccccctagtttgtgaga

SEQ ID NO: 308876 - DNA, 25 bp, Probe Sequence
tttgctactccatcagtaggtttag

SEQ ID NO: 308877 - DNA, 25 bp, Probe Sequence
tttccacagtcagaataggtttttc

SEQ ID NO: 308878 - DNA, 25 bp, Probe Sequence
tttgcccagatataacaggtgtgta

SEQ ID NO: 308879 - DNA, 25 bp, Probe Sequence
tattccaatatatcaagcgttctta

SEQ ID NO: 308880 - DNA, 25 bp, Probe Sequence
tattccaatgatacccaacagttta

SEQ ID NO: 308881 - DNA, 25 bp, Probe Sequence
tattccaaaatcgaccacatatttg

SEQ ID NO: 308882 - DNA, 25 bp, Probe Sequence
tttcgaaacatccagaacatgatcc

SEQ ID NO: 308883 - DNA, 25 bp, Probe Sequence
tttcagaactcaaagggcatttaga

SEQ ID NO: 308884 - DNA, 25 bp, Probe Sequence
tttatgcaacaaaatgggctggatg

SEQ ID NO: 308885 - DNA, 25 bp, Probe Sequence
tttgatgaagcctaattatgctgga

SEQ ID NO: 308886 - DNA, 25 bp, Probe Sequence
tttgtacatgtggcaatgttaaaag

SEQ ID NO: 308887 - DNA, 25 bp, Probe Sequence
tttgccaggcccaatgctttaacct

SEQ ID NO: 308888 - DNA, 25 bp, Probe Sequence
tttccaggctttaggtatcaccact

SEQ ID NO: 308889 - DNA, 25 bp, Probe Sequence
ttataaccttaaagtctcccagtct

SEQ ID NO: 308890 - DNA, 25 bp, Probe Sequence
ttgtaacctgtaggtccccgatgtt

SEQ ID NO: 308891 - DNA, 25 bp, Probe Sequence
tttattccacaagggccccgtgatc

SEQ ID NO: 308892 - DNA, 25 bp, Probe Sequence
tttgtttcataagatcccactggat

SEQ ID NO: 308893 - DNA, 25 bp, Probe Sequence
tttgttgtcaaacacccgttcatca

SEQ ID NO: 308894 - DNA, 25 bp, Probe Sequence
tttgtgcctcagaaaggccccctaa

SEQ ID NO: 308895 - DNA, 25 bp, Probe Sequence
tttgtcaccagttaagcaggctcct

SEQ ID NO: 308896 - DNA, 25 bp, Probe Sequence
tttgtaccttctgtgctggatgctc

SEQ ID NO: 308897 - DNA, 25 bp, Probe Sequence
tttgtactctgactgcctaagtgta

SEQ ID NO: 308898 - DNA, 25 bp, Probe Sequence
tttgtacctgttctacagtccagcc

SEQ ID NO: 308899 - DNA, 25 bp, Probe Sequence
tttgtagcactttgttgacttccat

SEQ ID NO: 308900 - DNA, 25 bp, Probe Sequence
ttttaggattagaagaattacataa

SEQ ID NO: 308901 - DNA, 25 bp, Probe Sequence
tttgtcgtgttacagttatacaatg

SEQ ID NO: 308902 - DNA, 25 bp, Probe Sequence
tattgttgtttcatactttaaattt

SEQ ID NO: 308903 - DNA, 25 bp, Probe Sequence
tttacttcctttattctacaactct

SEQ ID NO: 308904 - DNA, 25 bp, Probe Sequence
tttctttcctaatctcactcaaatc

SEQ ID NO: 308905 - DNA, 25 bp, Probe Sequence
tttcctacaccctattatccaaatt

SEQ ID NO: 308906 - DNA, 25 bp, Probe Sequence
tttcctgaccagactgttaaaaact

SEQ ID NO: 308907 - DNA, 25 bp, Probe Sequence
tttccttgccaactagtaaaaactg

SEQ ID NO: 308908 - DNA, 25 bp, Probe Sequence
tttcccctttcttgtaataaatgat

SEQ ID NO: 308909 - DNA, 25 bp, Probe Sequence
ttttccttttttgtctatgaagttg

SEQ ID NO: 308910 - DNA, 25 bp, Probe Sequence
tttgacgtttttgcttctgatgaaa

SEQ ID NO: 308911 - DNA, 25 bp, Probe Sequence
tttggcctctagatcctttgaatgg

SEQ ID NO: 308912 - DNA, 25 bp, Probe Sequence
tttggcctctagatcctttgaatgg

SEQ ID NO: 308913 - DNA, 25 bp, Probe Sequence
tattgacttctatgtcggtataatg

SEQ ID NO: 308914 - DNA, 25 bp, Probe Sequence
tattgaacctgttgatcacttaaag

SEQ ID NO: 308915 - DNA, 25 bp, Probe Sequence
tattgatactggtcccacttcacag

SEQ ID NO: 308916 - DNA, 25 bp, Probe Sequence
tattgaagctcctcactctaacaac

SEQ ID NO: 308917 - DNA, 25 bp, Probe Sequence
tattgatcactataattctaaaaca

SEQ ID NO: 308918 - DNA, 25 bp, Probe Sequence
ttttttaaaatgtctagaattcagg

SEQ ID NO: 308919 - DNA, 25 bp, Probe Sequence
tttggttgtcaatattaaatacaga

SEQ ID NO: 308920 - DNA, 25 bp, Probe Sequence
tttgtcttgtactcagagaagcaac

SEQ ID NO: 308921 - DNA, 25 bp, Probe Sequence
tttgcctttgaatcagaagacagca

SEQ ID NO: 308922 - DNA, 25 bp, Probe Sequence
tttgatcatttggaagaaagggtat

SEQ ID NO: 308923 - DNA, 25 bp, Probe Sequence
tttgaacttgtttggaacttgtcat

SEQ ID NO: 308924 - DNA, 25 bp, Probe Sequence
tttgacctggtttaacccttctgat

SEQ ID NO: 308925 - DNA, 25 bp, Probe Sequence
tattgactctgacttggacgtcctt

SEQ ID NO: 308926 - DNA, 25 bp, Probe Sequence
tattgactgtactggaactgcctcc

SEQ ID NO: 308927 - DNA, 25 bp, Probe Sequence
tttgagagtgtgtggaagtccccct

SEQ ID NO: 308928 - DNA, 25 bp, Probe Sequence
tttgggcatgtagcccatgccccgc

SEQ ID NO: 308929 - DNA, 25 bp, Probe Sequence
tttgcaggtgtatggtctctcccta

SEQ ID NO: 308930 - DNA, 25 bp, Probe Sequence
tttgggctgtaacttcttcgttgac

SEQ ID NO: 308931 - DNA, 25 bp, Probe Sequence
tttggactgaaagtgctttccggaa

SEQ ID NO: 308932 - DNA, 25 bp, Probe Sequence
tttccctaaaagtatctccatggaa

SEQ ID NO: 308933 - DNA, 25 bp, Probe Sequence
tttccagtaaaacctctcctaacag

SEQ ID NO: 308934 - DNA, 25 bp, Probe Sequence
tttcctgccagatacctttatcaaa

SEQ ID NO: 308935 - DNA, 25 bp, Probe Sequence
tttgtccagcgacactcattcattg

SEQ ID NO: 308936 - DNA, 25 bp, Probe Sequence
tttgtccgcattgatccttttgtga

SEQ ID NO: 308937 - DNA, 25 bp, Probe Sequence
tttgtcctgaatgtggtcacctgaa

SEQ ID NO: 308938 - DNA, 25 bp, Probe Sequence
tttccttgaatcagagccattctaa

SEQ ID NO: 308939 - DNA, 25 bp, Probe Sequence
tttctttggcagaggcccctaagca

SEQ ID NO: 308940 - DNA, 25 bp, Probe Sequence
tttgctttggaaacacccactcact

SEQ ID NO: 308941 - DNA, 25 bp, Probe Sequence
tttgattcatggattcacccagtca

SEQ ID NO: 308942 - DNA, 25 bp, Probe Sequence
tttgattctggtttccctcatacag

SEQ ID NO: 308943 - DNA, 25 bp, Probe Sequence
tttgatagcattttacccactatag

SEQ ID NO: 308944 - DNA, 25 bp, Probe Sequence
tattgtactttttatggcatgccca

SEQ ID NO: 308945 - DNA, 25 bp, Probe Sequence
tttgtgactgttacattgtgcaggg

SEQ ID NO: 308946 - DNA, 25 bp, Probe Sequence
tttggactgagaagcatcgaggcta

SEQ ID NO: 308947 - DNA, 25 bp, Probe Sequence
tttagggagacacagatggctggga

SEQ ID NO: 308948 - DNA, 25 bp, Probe Sequence
tttacggcgctaaggatgactctgg

SEQ ID NO: 308949 - DNA, 25 bp, Probe Sequence
tttggcgccctgaagggagttgtgg

SEQ ID NO: 308950 - DNA, 25 bp, Probe Sequence
tttgggagtctgaagtgggaggatc

SEQ ID NO: 308951 - DNA, 25 bp, Probe Sequence
tttggtggccttaattgttggcatc

SEQ ID NO: 308952 - DNA, 25 bp, Probe Sequence
tttggtggcatgctacttgcctaca

SEQ ID NO: 308953 - DNA, 25 bp, Probe Sequence
tttggctgagtgatactgccctcca

SEQ ID NO: 308954 - DNA, 25 bp, Probe Sequence
tttgatggggccaatgtcgtcccaa

SEQ ID NO: 308955 - DNA, 25 bp, Probe Sequence
tttgaggacctggaataggcgccaa

SEQ ID NO: 308956 - DNA, 25 bp, Probe Sequence
tttgaaagctgtggaataaggccca

SEQ ID NO: 308957 - DNA, 25 bp, Probe Sequence
tttagaacgtcgtatgagatcctac

SEQ ID NO: 308958 - DNA, 25 bp, Probe Sequence
tttggtatcgtggaaggactcatga

SEQ ID NO: 308959 - DNA, 25 bp, Probe Sequence
tttggggcttgtggggcttagagac

SEQ ID NO: 308960 - DNA, 25 bp, Probe Sequence
tttggagcctttggagagattgaaa

SEQ ID NO: 308961 - DNA, 25 bp, Probe Sequence
tttggtgctgacatcggaatggaga

SEQ ID NO: 308962 - DNA, 25 bp, Probe Sequence
tttgtgtccacaaacaagagtgaag

SEQ ID NO: 308963 - DNA, 25 bp, Probe Sequence
tttgtggcacctagatcgacgggac

SEQ ID NO: 308964 - DNA, 25 bp, Probe Sequence
tttggcaccgtcgatctacgggatc

SEQ ID NO: 308965 - DNA, 25 bp, Probe Sequence
tttgctaccaatatcatacgggact

SEQ ID NO: 308966 - DNA, 25 bp, Probe Sequence
tattgtcaaaatagtccaccagtga

SEQ ID NO: 308967 - DNA, 25 bp, Probe Sequence
tattgtggagaattccctagctgga

SEQ ID NO: 308968 - DNA, 25 bp, Probe Sequence
tattgtaaacacagctgcatgggga

SEQ ID NO: 308969 - DNA, 25 bp, Probe Sequence
tttggaatctacatgtcttgggggc

SEQ ID NO: 308970 - DNA, 25 bp, Probe Sequence
tttggagttatgtggctctggggca

SEQ ID NO: 308971 - DNA, 25 bp, Probe Sequence
tttggaggttgggagatatgaggga

SEQ ID NO: 308972 - DNA, 25 bp, Probe Sequence
tttccagacttgaaaacatggagga

SEQ ID NO: 308973 - DNA, 25 bp, Probe Sequence
tttgggatccaggaacacatcgatc

SEQ ID NO: 308974 - DNA, 25 bp, Probe Sequence
tttgggagccgaggaagatagatca

SEQ ID NO: 308975 - DNA, 25 bp, Probe Sequence
tttgcggatgctgaggaggatgatg

SEQ ID NO: 308976 - DNA, 25 bp, Probe Sequence
tttgcggtgaaaacataatgatgcc

SEQ ID NO: 308977 - DNA, 25 bp, Probe Sequence
tttggatgggactgcaactcatgac

SEQ ID NO: 308978 - DNA, 25 bp, Probe Sequence
tttggtgggcatctaatcctacata

SEQ ID NO: 308979 - DNA, 25 bp, Probe Sequence
tttgcttcaagctgtaatttagcaa

SEQ ID NO: 308980 - DNA, 25 bp, Probe Sequence
tttgtatcacctagaaatttccctt

SEQ ID NO: 308981 - DNA, 25 bp, Probe Sequence
tttgtatcaactcagaatttccaga

SEQ ID NO: 308982 - DNA, 25 bp, Probe Sequence
tttgtgtcatctgaacaatttccag

SEQ ID NO: 308983 - DNA, 25 bp, Probe Sequence
tttggatttccaccacatttgccac

SEQ ID NO: 308984 - DNA, 25 bp, Probe Sequence
tttggttgtgccccacattttgata

SEQ ID NO: 308985 - DNA, 25 bp, Probe Sequence
tttgtgtattgcgtgaaaacttata

SEQ ID NO: 308986 - DNA, 25 bp, Probe Sequence
tttggtgcatttaacgcaactggta

SEQ ID NO: 308987 - DNA, 25 bp, Probe Sequence
tttgaggctgtccagactggcctgc

SEQ ID NO: 308988 - DNA, 25 bp, Probe Sequence
ttcgcatggccaaattctggcctgc

SEQ ID NO: 308989 - DNA, 25 bp, Probe Sequence
tttgctgcagccaattatcgagggc

SEQ ID NO: 308990 - DNA, 25 bp, Probe Sequence
tttgctccagaaacacagatgtgtc

SEQ ID NO: 308991 - DNA, 25 bp, Probe Sequence
tattgtgctcagagacactgttgat

SEQ ID NO: 308992 - DNA, 25 bp, Probe Sequence
tttgtccaggatggccctgacaagt

SEQ ID NO: 308993 - DNA, 25 bp, Probe Sequence
ttatacctcgcatgtgtcacaacgt

SEQ ID NO: 308994 - DNA, 25 bp, Probe Sequence
ttctacctgggctgtgacaagttcc

SEQ ID NO: 308995 - DNA, 25 bp, Probe Sequence
tttccgcagggtgtgcgcgagtgtc

SEQ ID NO: 308996 - DNA, 25 bp, Probe Sequence
tttccggggcctacaggcgtgtaag

SEQ ID NO: 308997 - DNA, 25 bp, Probe Sequence
tttgacggtgtgacctcagggtcaa

SEQ ID NO: 308998 - DNA, 25 bp, Probe Sequence
tttgttggatgtactccaggaaata

SEQ ID NO: 308999 - DNA, 25 bp, Probe Sequence
tttgttattgatatctcggatacaa

SEQ ID NO: 309000 - DNA, 25 bp, Probe Sequence
tttgaacatgttattgcagtgattc

SEQ ID NO: 309001 - DNA, 25 bp, Probe Sequence
tttggataatctagttcatgtgcat

SEQ ID NO: 309002 - DNA, 25 bp, Probe Sequence
tttggactagctcatctcatggctc

SEQ ID NO: 309003 - DNA, 25 bp, Probe Sequence
tttggtcacctggctctatggccag

SEQ ID NO: 309004 - DNA, 25 bp, Probe Sequence
tttggatccagcactgatgaggcca

SEQ ID NO: 309005 - DNA, 25 bp, Probe Sequence
tttggtctccaagatgaatgctcat

SEQ ID NO: 309006 - DNA, 25 bp, Probe Sequence
tttggatgctaccactgtactgtcg

SEQ ID NO: 309007 - DNA, 25 bp, Probe Sequence
tttgtcagctacatcctactgtgcg

SEQ ID NO: 309008 - DNA, 25 bp, Probe Sequence
ttgttcagtgactattctcggggcc

SEQ ID NO: 309009 - DNA, 25 bp, Probe Sequence
ttcttcagtcatggcattcgcagtg

SEQ ID NO: 309010 - DNA, 25 bp, Probe Sequence
tttgatgctgtcagcactctgaggg

SEQ ID NO: 309011 - DNA, 25 bp, Probe Sequence
tttgatgctgtcactaccgtgggaa

SEQ ID NO: 309012 - DNA, 25 bp, Probe Sequence
tttgtcttcctcactagtgtaaaca

SEQ ID NO: 309013 - DNA, 25 bp, Probe Sequence
tttgtttccctcaagacataaaaca

SEQ ID NO: 309014 - DNA, 25 bp, Probe Sequence
tttggttctcccatacattttaata

SEQ ID NO: 309015 - DNA, 25 bp, Probe Sequence
tttggtttgccaaatcagattcttt

SEQ ID NO: 309016 - DNA, 25 bp, Probe Sequence
tttggtttgccaaatcagattcttt

SEQ ID NO: 309017 - DNA, 25 bp, Probe Sequence
tttctacttgccagtaattaccgta

SEQ ID NO: 309018 - DNA, 25 bp, Probe Sequence
tttcatagtcgtattttgccaccgt

SEQ ID NO: 309019 - DNA, 25 bp, Probe Sequence
tttaagtagtgtatcctgcacctac

SEQ ID NO: 309020 - DNA, 25 bp, Probe Sequence
tttgtgaggaggacttctcgccctc

SEQ ID NO: 309021 - DNA, 25 bp, Probe Sequence
tttgcatattagcatcagtcaaccc

SEQ ID NO: 309022 - DNA, 25 bp, Probe Sequence
tttgttaatctcaactaacgcctac

SEQ ID NO: 309023 - DNA, 25 bp, Probe Sequence
tttgtttcttcggctaaaggtacag

SEQ ID NO: 309024 - DNA, 25 bp, Probe Sequence
tttgccaatcttagcctaaaagaaa

SEQ ID NO: 309025 - DNA, 25 bp, Probe Sequence
tttgccgacctacctcaggttgaaa

SEQ ID NO: 309026 - DNA, 25 bp, Probe Sequence
tttgccgaatttgtcgtgcctacaa

SEQ ID NO: 309027 - DNA, 25 bp, Probe Sequence
tttgcctgaatcttttcctttaact

SEQ ID NO: 309028 - DNA, 25 bp, Probe Sequence
tttccttcagttatattttaaatca

SEQ ID NO: 309029 - DNA, 25 bp, Probe Sequence
tttggttactttttgtcttattgat

SEQ ID NO: 309030 - DNA, 25 bp, Probe Sequence
tttggttcacacttatttataactt

SEQ ID NO: 309031 - DNA, 25 bp, Probe Sequence
tttgagttaacttcagtcctttctt

SEQ ID NO: 309032 - DNA, 25 bp, Probe Sequence
tttggttccattttgtacacgtttg

SEQ ID NO: 309033 - DNA, 25 bp, Probe Sequence
tttggcaacctttgtgttacagatt

SEQ ID NO: 309034 - DNA, 25 bp, Probe Sequence
tttgtattcccattttctacagttt

SEQ ID NO: 309035 - DNA, 25 bp, Probe Sequence
tttgtagtctctcctatgtcataat

SEQ ID NO: 309036 - DNA, 25 bp, Probe Sequence
tttgtgcgtctctgttgattccaag

SEQ ID NO: 309037 - DNA, 25 bp, Probe Sequence
tttgtgctatttatggaacccagag

SEQ ID NO: 309038 - DNA, 25 bp, Probe Sequence
tttgtgtcatgacttccaaacccag

SEQ ID NO: 309039 - DNA, 25 bp, Probe Sequence
tttgattcatgacatccatttccca

SEQ ID NO: 309040 - DNA, 25 bp, Probe Sequence
tttgtcccattatttggagcagaaa

SEQ ID NO: 309041 - DNA, 25 bp, Probe Sequence
tttcctccatgttataaaacctagt

SEQ ID NO: 309042 - DNA, 25 bp, Probe Sequence
tttactcaaggataacacggcgatg

SEQ ID NO: 309043 - DNA, 25 bp, Probe Sequence
tttgaccacggagtacctggggatc

SEQ ID NO: 309044 - DNA, 25 bp, Probe Sequence
tttacctagctaccactaggtggat

SEQ ID NO: 309045 - DNA, 25 bp, Probe Sequence
tttccagccatatcgccaacgtgga

SEQ ID NO: 309046 - DNA, 25 bp, Probe Sequence
tttcgccctttctacagacactggg

SEQ ID NO: 309047 - DNA, 25 bp, Probe Sequence
tttccatccttttcagccaactgga

SEQ ID NO: 309048 - DNA, 25 bp, Probe Sequence
tttggcttttgttatgcaaattgtt

SEQ ID NO: 309049 - DNA, 25 bp, Probe Sequence
tttggtttattctcaggagttgctt

SEQ ID NO: 309050 - DNA, 25 bp, Probe Sequence
tttgggatcaattcccagaggccct

SEQ ID NO: 309051 - DNA, 25 bp, Probe Sequence
tttggcagccaaagtccactggccc

SEQ ID NO: 309052 - DNA, 25 bp, Probe Sequence
ttttgcggaacgcgactggcagcca

SEQ ID NO: 309053 - DNA, 25 bp, Probe Sequence
tttctgggaagagagccatggctcc

SEQ ID NO: 309054 - DNA, 25 bp, Probe Sequence
tttccgaaagaccaaggcagctccc

SEQ ID NO: 309055 - DNA, 25 bp, Probe Sequence
tttgcactaaagccaaaccacaccg

SEQ ID NO: 309056 - DNA, 25 bp, Probe Sequence
tttgagaaggtccaacccacacacg

SEQ ID NO: 309057 - DNA, 25 bp, Probe Sequence
tttgtacagggtaactctacagaag

SEQ ID NO: 309058 - DNA, 25 bp, Probe Sequence
tttgtgagggctttgccttcacgac

SEQ ID NO: 309059 - DNA, 25 bp, Probe Sequence
tttggaggtgcttgatctatctaca

SEQ ID NO: 309060 - DNA, 25 bp, Probe Sequence
tttgtactgtgttgtgcttgctgtc

SEQ ID NO: 309061 - DNA, 25 bp, Probe Sequence
tttggagcttgtggagttgatgact

SEQ ID NO: 309062 - DNA, 25 bp, Probe Sequence
tttgtgcactaggcgcagttgtgta

SEQ ID NO: 309063 - DNA, 25 bp, Probe Sequence
tttgccgcatcagccgcattgaata

SEQ ID NO: 309064 - DNA, 25 bp, Probe Sequence
tttgactagacatcctgtgcaatag

SEQ ID NO: 309065 - DNA, 25 bp, Probe Sequence
tttgtgcatatggcaacgttcatgt

SEQ ID NO: 309066 - DNA, 25 bp, Probe Sequence
tttgtgcttggaatgtgttgatgtg

SEQ ID NO: 309067 - DNA, 25 bp, Probe Sequence
tttggcctgttttgatgtatgtgtg

SEQ ID NO: 309068 - DNA, 25 bp, Probe Sequence
tttgatgcctgtatactggatatga

SEQ ID NO: 309069 - DNA, 25 bp, Probe Sequence
tttgagctcataggaacaggtagac

SEQ ID NO: 309070 - DNA, 25 bp, Probe Sequence
tttggtccagcgtaacgtgaacata

SEQ ID NO: 309071 - DNA, 25 bp, Probe Sequence
tttgagatacgtttattgtattcat

SEQ ID NO: 309072 - DNA, 25 bp, Probe Sequence
tttgagtcaattttatggttctcag

SEQ ID NO: 309073 - DNA, 25 bp, Probe Sequence
tttggtctctatttcattttttgca

SEQ ID NO: 309074 - DNA, 25 bp, Probe Sequence
tttggaatgcacttccattttttgc

SEQ ID NO: 309075 - DNA, 25 bp, Probe Sequence
tttaagtctctgactcttgcctttc

SEQ ID NO: 309076 - DNA, 25 bp, Probe Sequence
tttggaaccagactcttgcctgttt

SEQ ID NO: 309077 - DNA, 25 bp, Probe Sequence
tttgagcaagccgagctctccttgt

SEQ ID NO: 309078 - DNA, 25 bp, Probe Sequence
tttgacagaagcggaactctcttct

SEQ ID NO: 309079 - DNA, 25 bp, Probe Sequence
tttgtctaactccagagtccttcct

SEQ ID NO: 309080 - DNA, 25 bp, Probe Sequence
tttgttttgctacgagtccacattc

SEQ ID NO: 309081 - DNA, 25 bp, Probe Sequence
tttgttttgctacgagtccacattc

SEQ ID NO: 309082 - DNA, 25 bp, Probe Sequence
tttgttttgctaccaatatcatacg

SEQ ID NO: 309083 - DNA, 25 bp, Probe Sequence
tttgttgatctgagccttctatgaa

SEQ ID NO: 309084 - DNA, 25 bp, Probe Sequence
tttgtgttctgtggtacttgctgag

SEQ ID NO: 309085 - DNA, 25 bp, Probe Sequence
tttgttcctgcgttactttgctgag

SEQ ID NO: 309086 - DNA, 25 bp, Probe Sequence
tttgcattttccttcccaatgcaga

SEQ ID NO: 309087 - DNA, 25 bp, Probe Sequence
tttgaattatagtacccacacatgc

SEQ ID NO: 309088 - DNA, 25 bp, Probe Sequence
tttgtttttatgtctcagaccatct

SEQ ID NO: 309089 - DNA, 25 bp, Probe Sequence
tttgtattctctagacggacactgt

SEQ ID NO: 309090 - DNA, 25 bp, Probe Sequence
tttgctctactaaatttgctactgt

SEQ ID NO: 309091 - DNA, 25 bp, Probe Sequence
tttgttttatcctttgtatctgaaa

SEQ ID NO: 309092 - DNA, 25 bp, Probe Sequence
tttgtatattcaccctttgtctagt

SEQ ID NO: 309093 - DNA, 25 bp, Probe Sequence
tttgttttccgactttctcaagcta

SEQ ID NO: 309094 - DNA, 25 bp, Probe Sequence
tttgattttctgtgtccttaagtac

SEQ ID NO: 309095 - DNA, 25 bp, Probe Sequence
tttgacagttcattattcctataag

SEQ ID NO: 309096 - DNA, 25 bp, Probe Sequence
tttgaagtatcttgtatcgactaca

SEQ ID NO: 309097 - DNA, 25 bp, Probe Sequence
tttgggatatcttttctcacattca

SEQ ID NO: 309098 - DNA, 25 bp, Probe Sequence
tttgggatcttgttggatgcactta

SEQ ID NO: 309099 - DNA, 25 bp, Probe Sequence
tttggcttggtgtgtatgctcttca

SEQ ID NO: 309100 - DNA, 25 bp, Probe Sequence
tttgtggggtattgttgtttctgct

SEQ ID NO: 309101 - DNA, 25 bp, Probe Sequence
ttctgtggggtcactggtaatggct

SEQ ID NO: 309102 - DNA, 25 bp, Probe Sequence
tttgtggctttaacttgtaagtctg

SEQ ID NO: 309103 - DNA, 25 bp, Probe Sequence
tttggtgcttagtctttgtaagggc

SEQ ID NO: 309104 - DNA, 25 bp, Probe Sequence
tttgagttgtttgttgctaagaggt

SEQ ID NO: 309105 - DNA, 25 bp, Probe Sequence
ttcggcttttgctttgcgttagggt

SEQ ID NO: 309106 - DNA, 25 bp, Probe Sequence
ttcagccgaatttttggggaggtgg

SEQ ID NO: 309107 - DNA, 25 bp, Probe Sequence
tttccagaattctttggggctgtta

SEQ ID NO: 309108 - DNA, 25 bp, Probe Sequence
tttccagcagttcggggacagcaat

SEQ ID NO: 309109 - DNA, 25 bp, Probe Sequence
tttgctggcagcttcctgaaacaga

SEQ ID NO: 309110 - DNA, 25 bp, Probe Sequence
tttgcggggctcgatgatgcgcacg

SEQ ID NO: 309111 - DNA, 25 bp, Probe Sequence
tttccgcgtgatggctatgccttgc

SEQ ID NO: 309112 - DNA, 25 bp, Probe Sequence
ttccccaggtagaagactttctcct

SEQ ID NO: 309113 - DNA, 25 bp, Probe Sequence
ttactccaaggtccaacttttccag

SEQ ID NO: 309114 - DNA, 25 bp, Probe Sequence
ttatgccaagaggtaccacattttc

SEQ ID NO: 309115 - DNA, 25 bp, Probe Sequence
tttgttaagttcagccattattact

SEQ ID NO: 309116 - DNA, 25 bp, Probe Sequence
tttgttaatgttctctatttcttct

SEQ ID NO: 309117 - DNA, 25 bp, Probe Sequence
tttgtaactttgcatgttcttgttt

SEQ ID NO: 309118 - DNA, 25 bp, Probe Sequence
tttgtataattacatattgctgctt

SEQ ID NO: 309119 - DNA, 25 bp, Probe Sequence
tttcatgatgcatgggtcatttgtc

SEQ ID NO: 309120 - DNA, 25 bp, Probe Sequence
tttgctaaggatgggcattttgccc

SEQ ID NO: 309121 - DNA, 25 bp, Probe Sequence
tttgataagtagtgctgtttgccag

SEQ ID NO: 309122 - DNA, 25 bp, Probe Sequence
tttgtgttgtagtccatgctattaa

SEQ ID NO: 309123 - DNA, 25 bp, Probe Sequence
tttgtttgtaagaagtcatctactt

SEQ ID NO: 309124 - DNA, 25 bp, Probe Sequence
tttgtttgaatgttagatgcttagt

SEQ ID NO: 309125 - DNA, 25 bp, Probe Sequence
tttgttataatgccttgtaaatgct

SEQ ID NO: 309126 - DNA, 25 bp, Probe Sequence
tttgtgaaatatcttgttactgctt

SEQ ID NO: 309127 - DNA, 25 bp, Probe Sequence
tttgtgagccgtgtcgtatgaccta

SEQ ID NO: 309128 - DNA, 25 bp, Probe Sequence
tttgtggattgtgtcctatgcgctc

SEQ ID NO: 309129 - DNA, 25 bp, Probe Sequence
tttgtctattggtctctttgccagc

SEQ ID NO: 309130 - DNA, 25 bp, Probe Sequence
tttgccttgtggtgttccatcaggt

SEQ ID NO: 309131 - DNA, 25 bp, Probe Sequence
tttgcacttcggttttttccgcatg

SEQ ID NO: 309132 - DNA, 25 bp, Probe Sequence
tttgacttcgtactgtctttcacct

SEQ ID NO: 309133 - DNA, 25 bp, Probe Sequence
tttgtcttggaactgtcttattttt

SEQ ID NO: 309134 - DNA, 25 bp, Probe Sequence
tttgtctccataagcctgttttttt

SEQ ID NO: 309135 - DNA, 25 bp, Probe Sequence
ttattccccagctaagtcttatttc

SEQ ID NO: 309136 - DNA, 25 bp, Probe Sequence
tttccccacaggttgtcattactta

SEQ ID NO: 309137 - DNA, 25 bp, Probe Sequence
tttccccaagttaaatgccctatga

SEQ ID NO: 309138 - DNA, 25 bp, Probe Sequence
tttccactgagaaagctaagcccta

SEQ ID NO: 309139 - DNA, 25 bp, Probe Sequence
tttgctcactgatttggtatactgc

SEQ ID NO: 309140 - DNA, 25 bp, Probe Sequence
tttgtttggaatcgtgccactgctg

SEQ ID NO: 309141 - DNA, 25 bp, Probe Sequence
tttgtttggaatcgtgccactgctg

SEQ ID NO: 309142 - DNA, 25 bp, Probe Sequence
tttttgtggaatctgcaagtggata

SEQ ID NO: 309143 - DNA, 25 bp, Probe Sequence
ttttcggaagtgctgagagttcaaa

SEQ ID NO: 309144 - DNA, 25 bp, Probe Sequence
tttctggaaaggaggggtcctgcag

SEQ ID NO: 309145 - DNA, 25 bp, Probe Sequence
ttttggaaactctggaggtcccctg

SEQ ID NO: 309146 - DNA, 25 bp, Probe Sequence
ttttggaaactctggaggtcccctg

SEQ ID NO: 309147 - DNA, 25 bp, Probe Sequence
tttgtggaaaccttggacagcccca

SEQ ID NO: 309148 - DNA, 25 bp, Probe Sequence
ttaccaaaacccatgccatgccaaa

SEQ ID NO: 309149 - DNA, 25 bp, Probe Sequence
ttaccatgaatttacttcctcccaa

SEQ ID NO: 309150 - DNA, 25 bp, Probe Sequence
tttcaaaattagtaatccccgccag

SEQ ID NO: 309151 - DNA, 25 bp, Probe Sequence
ttttctatattacaagggccccagt

SEQ ID NO: 309152 - DNA, 25 bp, Probe Sequence
tttttttaggtgcagggcgcctcgt

SEQ ID NO: 309153 - DNA, 25 bp, Probe Sequence
tttcctttaaggcagaggctggtcg

SEQ ID NO: 309154 - DNA, 25 bp, Probe Sequence
tttgtgttgtatggaggagggctgg

SEQ ID NO: 309155 - DNA, 25 bp, Probe Sequence
tttgcgctggataagggggagttga

SEQ ID NO: 309156 - DNA, 25 bp, Probe Sequence
tttgccttgatttggtggggtacag

SEQ ID NO: 309157 - DNA, 25 bp, Probe Sequence
tttgccactgttagatagttggaaa

SEQ ID NO: 309158 - DNA, 25 bp, Probe Sequence
tttgcctcagttgaattagtgaaat

SEQ ID NO: 309159 - DNA, 25 bp, Probe Sequence
tttcactggagttacattaatgtta

SEQ ID NO: 309160 - DNA, 25 bp, Probe Sequence
tttgcctggagtgacactacactct

SEQ ID NO: 309161 - DNA, 25 bp, Probe Sequence
tttgatctgtatctacaccacccaa

SEQ ID NO: 309162 - DNA, 25 bp, Probe Sequence
tttgatctgcttgtagcaccagcta

SEQ ID NO: 309163 - DNA, 25 bp, Probe Sequence
tttgatgtctatgcttggctctctg

SEQ ID NO: 309164 - DNA, 25 bp, Probe Sequence
tttgatggcacatccgatggctcct

SEQ ID NO: 309165 - DNA, 25 bp, Probe Sequence
tttgggcagatgtcccattgctccc

SEQ ID NO: 309166 - DNA, 25 bp, Probe Sequence
tttgggcagatgtcccattgctccc

SEQ ID NO: 309167 - DNA, 25 bp, Probe Sequence
tttgggcagatgtcccattgctccc

SEQ ID NO: 309168 - DNA, 25 bp, Probe Sequence
tttgtggcagatcatccttttcttt

SEQ ID NO: 309169 - DNA, 25 bp, Probe Sequence
tttgcatgggcaccacatttcttat

SEQ ID NO: 309170 - DNA, 25 bp, Probe Sequence
tttgcataggtgccaccatcagctt

SEQ ID NO: 309171 - DNA, 25 bp, Probe Sequence
tttcctgggcctctcagttgaacaa

SEQ ID NO: 309172 - DNA, 25 bp, Probe Sequence
tttgcacttgtgctttcagttagcc

SEQ ID NO: 309173 - DNA, 25 bp, Probe Sequence
ttccctttgtatatcagttacgggt

SEQ ID NO: 309174 - DNA, 25 bp, Probe Sequence
ttgtcctggttattgtcggtatcgg

SEQ ID NO: 309175 - DNA, 25 bp, Probe Sequence
ttggcctggaggtggggttgggatt

SEQ ID NO: 309176 - DNA, 25 bp, Probe Sequence
ttggctcaaaggtggtggttctggc

SEQ ID NO: 309177 - DNA, 25 bp, Probe Sequence
ttgactcaatactgtgttggtccgt

SEQ ID NO: 309178 - DNA, 25 bp, Probe Sequence
ttagctcaaaatatctgtggtcctg

SEQ ID NO: 309179 - DNA, 25 bp, Probe Sequence
tttgctcaaaatcccatggttccct

SEQ ID NO: 309180 - DNA, 25 bp, Probe Sequence
tttgtccacagttcctggttcatca

SEQ ID NO: 309181 - DNA, 25 bp, Probe Sequence
tttgcctcaagtacctgctgtttac

SEQ ID NO: 309182 - DNA, 25 bp, Probe Sequence
tttgcctatgtgttccagtttgacc

SEQ ID NO: 309183 - DNA, 25 bp, Probe Sequence
tttgactcttaaaggattcatgtcc

SEQ ID NO: 309184 - DNA, 25 bp, Probe Sequence
tttgctcactaagcagggtcgtccc

SEQ ID NO: 309185 - DNA, 25 bp, Probe Sequence
tttcacccaggggtggtggtcccag

SEQ ID NO: 309186 - DNA, 25 bp, Probe Sequence
tttatcccagggtggctgaatcacg

SEQ ID NO: 309187 - DNA, 25 bp, Probe Sequence
tttccttaatggtggctgctagagc

SEQ ID NO: 309188 - DNA, 25 bp, Probe Sequence
tttccctttggctaggagcaagcac

SEQ ID NO: 309189 - DNA, 25 bp, Probe Sequence
tttccagcttgtcaaggagaaggaa

SEQ ID NO: 309190 - DNA, 25 bp, Probe Sequence
tttccctagtcattgggaaagtaga

SEQ ID NO: 309191 - DNA, 25 bp, Probe Sequence
tttccaaagatgtatgttgcataat

SEQ ID NO: 309192 - DNA, 25 bp, Probe Sequence
tttgcacagaagatagtgtcaagga

SEQ ID NO: 309193 - DNA, 25 bp, Probe Sequence
tttgactaaagctatgttacatgga

SEQ ID NO: 309194 - DNA, 25 bp, Probe Sequence
tttgtattgaactgttaattgaagc

SEQ ID NO: 309195 - DNA, 25 bp, Probe Sequence
tttagttggacttgccaaattggca

SEQ ID NO: 309196 - DNA, 25 bp, Probe Sequence
tttaggttgttaccaagtatgaagt

SEQ ID NO: 309197 - DNA, 25 bp, Probe Sequence
tttaggttttaggaggcttgagaat

SEQ ID NO: 309198 - DNA, 25 bp, Probe Sequence
tttaggtttagagctggtcagtgaa

SEQ ID NO: 309199 - DNA, 25 bp, Probe Sequence
ttaagggtcgaaggtggatttagca

SEQ ID NO: 309200 - DNA, 25 bp, Probe Sequence
tttgagggcccatagtgaatattaa

SEQ ID NO: 309201 - DNA, 25 bp, Probe Sequence
tttgttggcttatactgtgataaaa

SEQ ID NO: 309202 - DNA, 25 bp, Probe Sequence
tttgtttttgacacttgaagaaatg

SEQ ID NO: 309203 - DNA, 25 bp, Probe Sequence
tttggtcttagagtgtttggatata

SEQ ID NO: 309204 - DNA, 25 bp, Probe Sequence
tttggtctaggcttcattttgatat

SEQ ID NO: 309205 - DNA, 25 bp, Probe Sequence
tttggtccaggttctgttctgatga

SEQ ID NO: 309206 - DNA, 25 bp, Probe Sequence
tttgtgtcataagacatcttcaaga

SEQ ID NO: 309207 - DNA, 25 bp, Probe Sequence
tttgctctgcaaaggatctgttaag

SEQ ID NO: 309208 - DNA, 25 bp, Probe Sequence
tttgcctcaaggtctctgtaaatga

SEQ ID NO: 309209 - DNA, 25 bp, Probe Sequence
tttgcccacggattctgtaactgta

SEQ ID NO: 309210 - DNA, 25 bp, Probe Sequence
ttggcatcccgttctttaacgtaat

SEQ ID NO: 309211 - DNA, 25 bp, Probe Sequence
ttggctaccgaatactagaccttat

SEQ ID NO: 309212 - DNA, 25 bp, Probe Sequence
ttgtgccattgaaaaacttgacctt

SEQ ID NO: 309213 - DNA, 25 bp, Probe Sequence
tttgcatttcaaaaaggtgcaccaa

SEQ ID NO: 309214 - DNA, 25 bp, Probe Sequence
tttctcctcagaagtagggaccgct

SEQ ID NO: 309215 - DNA, 25 bp, Probe Sequence
tttaagctgctgaaggaaggacaca

SEQ ID NO: 309216 - DNA, 25 bp, Probe Sequence
tttgaactttccaaagtgcagccac

SEQ ID NO: 309217 - DNA, 25 bp, Probe Sequence
tttgtgacttgtatgagagagaccc

SEQ ID NO: 309218 - DNA, 25 bp, Probe Sequence
tttctgtttttctaaatgacccgtg

SEQ ID NO: 309219 - DNA, 25 bp, Probe Sequence
tttgctgcgtctactgcgagaatga

SEQ ID NO: 309220 - DNA, 25 bp, Probe Sequence
tttgtggtccactgagctataactt

SEQ ID NO: 309221 - DNA, 25 bp, Probe Sequence
tttaggtgacactatagaacaagtt

SEQ ID NO: 309222 - DNA, 25 bp, Probe Sequence
tttcagggagcccttcagcacaggt

SEQ ID NO: 309223 - DNA, 25 bp, Probe Sequence
tttcagtggaccctgtggccaggtg

SEQ ID NO: 309224 - DNA, 25 bp, Probe Sequence
tttcagtggaccctgtggccaggtg

SEQ ID NO: 309225 - DNA, 25 bp, Probe Sequence
tttcagtggaccctgtggccaggtg

SEQ ID NO: 309226 - DNA, 25 bp, Probe Sequence
tttagtcctggcgtgtggcacacgc

SEQ ID NO: 309227 - DNA, 25 bp, Probe Sequence
tttctgtctatgtcacagtgtcccc

SEQ ID NO: 309228 - DNA, 25 bp, Probe Sequence
tttcttgcaagatcagggaccccat

SEQ ID NO: 309229 - DNA, 25 bp, Probe Sequence
tttcctgcaagagatgatggttcca

SEQ ID NO: 309230 - DNA, 25 bp, Probe Sequence
tttctcagagagaccatgcaggaac

SEQ ID NO: 309231 - DNA, 25 bp, Probe Sequence
ttatcctggtaccagcagaaacctg

SEQ ID NO: 309232 - DNA, 25 bp, Probe Sequence
tttgctctggatacaccgaatgacc

SEQ ID NO: 309233 - DNA, 25 bp, Probe Sequence
tttcccagattctcggattctcgac

SEQ ID NO: 309234 - DNA, 25 bp, Probe Sequence
tttcctgaggcctcgagtgtgtcag

SEQ ID NO: 309235 - DNA, 25 bp, Probe Sequence
tttccttgtccccaaggtgtgcaga

SEQ ID NO: 309236 - DNA, 25 bp, Probe Sequence
tttcagcattggctctacagcgttg

SEQ ID NO: 309237 - DNA, 25 bp, Probe Sequence
tttgcagattgggtaacacaggaac

SEQ ID NO: 309238 - DNA, 25 bp, Probe Sequence
tttagcttgggtccaccatgcagaa

SEQ ID NO: 309239 - DNA, 25 bp, Probe Sequence
tttgagcatcgaatccccaaggaac

SEQ ID NO: 309240 - DNA, 25 bp, Probe Sequence
tttgagtctaatgcacgttctaaca

SEQ ID NO: 309241 - DNA, 25 bp, Probe Sequence
tttgagacattagccagtagctcac

SEQ ID NO: 309242 - DNA, 25 bp, Probe Sequence
tttgagatcttttgccagctgaccc

SEQ ID NO: 309243 - DNA, 25 bp, Probe Sequence
tttgatttttgacacatacacccct

SEQ ID NO: 309244 - DNA, 25 bp, Probe Sequence
tttgaaattaatcccagacacccgc

SEQ ID NO: 309245 - DNA, 25 bp, Probe Sequence
tttgaatgcatccaccctgagaagc

SEQ ID NO: 309246 - DNA, 25 bp, Probe Sequence
tttgggctccacactggcagaggag

SEQ ID NO: 309247 - DNA, 25 bp, Probe Sequence
tttgggactgcatttctggaaacat

SEQ ID NO: 309248 - DNA, 25 bp, Probe Sequence
tttgctgtactctttgctagtacca

SEQ ID NO: 309249 - DNA, 25 bp, Probe Sequence
tttgcatttctcaattgcatcggag

SEQ ID NO: 309250 - DNA, 25 bp, Probe Sequence
tttgccttccaagccgaagttaaca

SEQ ID NO: 309251 - DNA, 25 bp, Probe Sequence
tttgccaatctcaacacccaagttg

SEQ ID NO: 309252 - DNA, 25 bp, Probe Sequence
tttgccaatctcaacacccaagttg

SEQ ID NO: 309253 - DNA, 25 bp, Probe Sequence
tttccagttaagagactcagttgct

SEQ ID NO: 309254 - DNA, 25 bp, Probe Sequence
tttaccattaagccaggcttgttgc

SEQ ID NO: 309255 - DNA, 25 bp, Probe Sequence
tttgcctttaaggaggcttgagtgg

SEQ ID NO: 309256 - DNA, 25 bp, Probe Sequence
tttgttgtttcagtggtttgtgcta

SEQ ID NO: 309257 - DNA, 25 bp, Probe Sequence
tttgttgcttctctatctgtattta

SEQ ID NO: 309258 - DNA, 25 bp, Probe Sequence
tttgattttcccccttattgatggg

SEQ ID NO: 309259 - DNA, 25 bp, Probe Sequence
tttgttttcctaccttatgctgagt

SEQ ID NO: 309260 - DNA, 25 bp, Probe Sequence
tttgttttctcaaatatttgctatg

SEQ ID NO: 309261 - DNA, 25 bp, Probe Sequence
tttgtctttcaaatttactgtctta

SEQ ID NO: 309262 - DNA, 25 bp, Probe Sequence
tttgtctttacataaattgttcata

SEQ ID NO: 309263 - DNA, 25 bp, Probe Sequence
tttgttgtcttatattgtagttcat

SEQ ID NO: 309264 - DNA, 25 bp, Probe Sequence
tttgtgtgtctgttaaatgaatgtc

SEQ ID NO: 309265 - DNA, 25 bp, Probe Sequence
tttgtcgtcatgtagcacaaagttt

SEQ ID NO: 309266 - DNA, 25 bp, Probe Sequence
tttgacccatttaataatgctcttg

SEQ ID NO: 309267 - DNA, 25 bp, Probe Sequence
tttgacacccttcattcatttataa

SEQ ID NO: 309268 - DNA, 25 bp, Probe Sequence
tttgaccccttattgattcattgta

SEQ ID NO: 309269 - DNA, 25 bp, Probe Sequence
tttgacccagtatgtcttgtagaca

SEQ ID NO: 309270 - DNA, 25 bp, Probe Sequence
tttgacccagtttgcatttgtacat

SEQ ID NO: 309271 - DNA, 25 bp, Probe Sequence
tttacccagtttgtgtgtttgagct

SEQ ID NO: 309272 - DNA, 25 bp, Probe Sequence
tttacaccagtgtgggcatccagtg

SEQ ID NO: 309273 - DNA, 25 bp, Probe Sequence
tttagccccaggggagcagctcagc

SEQ ID NO: 309274 - DNA, 25 bp, Probe Sequence
tttgaccaaccgcagcaatgcacag

SEQ ID NO: 309275 - DNA, 25 bp, Probe Sequence
tttgttctactctaggcagtgacag

SEQ ID NO: 309276 - DNA, 25 bp, Probe Sequence
tttgtttacaatttatggcagatgt

SEQ ID NO: 309277 - DNA, 25 bp, Probe Sequence
tttgtgctccacttaaaccagatgt

SEQ ID NO: 309278 - DNA, 25 bp, Probe Sequence
tttgatgctcgctgggtaacatact

SEQ ID NO: 309279 - DNA, 25 bp, Probe Sequence
tttcaccgcagtgggctaccataaa

SEQ ID NO: 309280 - DNA, 25 bp, Probe Sequence
tttccaaccattggtcaccagaaat

SEQ ID NO: 309281 - DNA, 25 bp, Probe Sequence
tttcccatcactctccactaggaaa

SEQ ID NO: 309282 - DNA, 25 bp, Probe Sequence
tttgttcattctccccagtgaggga

SEQ ID NO: 309283 - DNA, 25 bp, Probe Sequence
tttgactatctgactccaaggaatg

SEQ ID NO: 309284 - DNA, 25 bp, Probe Sequence
ttatgactctggtcctttggaatga

SEQ ID NO: 309285 - DNA, 25 bp, Probe Sequence
tttactgctggtcactcatggaatc

SEQ ID NO: 309286 - DNA, 25 bp, Probe Sequence
tttgatacttgtgctctgctgagaa

SEQ ID NO: 309287 - DNA, 25 bp, Probe Sequence
tttgatgacttctcacactatgaga

SEQ ID NO: 309288 - DNA, 25 bp, Probe Sequence
tttgcagagcttcacgcactatcga

SEQ ID NO: 309289 - DNA, 25 bp, Probe Sequence
tttgcagcactattttcactgtcag

SEQ ID NO: 309290 - DNA, 25 bp, Probe Sequence
tttgagcatgctacttaatctatat

SEQ ID NO: 309291 - DNA, 25 bp, Probe Sequence
tttgagctgcttccatatctttcat

SEQ ID NO: 309292 - DNA, 25 bp, Probe Sequence
tttgcagcattcctagtcgttgctt

SEQ ID NO: 309293 - DNA, 25 bp, Probe Sequence
tttgagttctatttccagacttgaa

SEQ ID NO: 309294 - DNA, 25 bp, Probe Sequence
tttgaattggttgctagcacttaaa

SEQ ID NO: 309295 - DNA, 25 bp, Probe Sequence
tttgaaatgtttactgacacttaca

SEQ ID NO: 309296 - DNA, 25 bp, Probe Sequence
tttgccagctgtatattatccctaa

SEQ ID NO: 309297 - DNA, 25 bp, Probe Sequence
tttgtgtgtgttaattctctctctc

SEQ ID NO: 309298 - DNA, 25 bp, Probe Sequence
tttgtgcagctgacttttctgaccc

SEQ ID NO: 309299 - DNA, 25 bp, Probe Sequence
gaatctacagatgccctcaagcttt

SEQ ID NO: 309300 - DNA, 25 bp, Probe Sequence
tttgttgcagctgctgttgctgccc

SEQ ID NO: 309301 - DNA, 25 bp, Probe Sequence
tttgctgtgcttgatgttgcatcag

SEQ ID NO: 309302 - DNA, 25 bp, Probe Sequence
tttgtgcctgtgcagattgcaatag

SEQ ID NO: 309303 - DNA, 25 bp, Probe Sequence
tttgccagtgcatatgatgtgacat

SEQ ID NO: 309304 - DNA, 25 bp, Probe Sequence
tttgccacagcgtgcatgtctgcac

SEQ ID NO: 309305 - DNA, 25 bp, Probe Sequence
tttctgtcactgtggggactcaggc

SEQ ID NO: 309306 - DNA, 25 bp, Probe Sequence
tttcgtacttggcagtaccatctac

SEQ ID NO: 309307 - DNA, 25 bp, Probe Sequence
tttccaacttggcagtaaatctacg

SEQ ID NO: 309308 - DNA, 25 bp, Probe Sequence
tttccaactccgtgtgacgtttctg

SEQ ID NO: 309309 - DNA, 25 bp, Probe Sequence
tttccaactccgtgtgacgtttctg

SEQ ID NO: 309310 - DNA, 25 bp, Probe Sequence
tttcccctcactatgaagcttttct

SEQ ID NO: 309311 - DNA, 25 bp, Probe Sequence
tttgcatccctcgtttaattaaatt

SEQ ID NO: 309312 - DNA, 25 bp, Probe Sequence
tttgaaccccaattaaatgaactgt

SEQ ID NO: 309313 - DNA, 25 bp, Probe Sequence
tttgcaatctacttatctaacaaag

SEQ ID NO: 309314 - DNA, 25 bp, Probe Sequence
tttgccctcctttctacagaagagg

SEQ ID NO: 309315 - DNA, 25 bp, Probe Sequence
tttgcagttttttctgttgcaacag

SEQ ID NO: 309316 - DNA, 25 bp, Probe Sequence
tttgtgtgtttttagctgtgacaca

SEQ ID NO: 309317 - DNA, 25 bp, Probe Sequence
tttgtgttcttcatacagtatcaga

SEQ ID NO: 309318 - DNA, 25 bp, Probe Sequence
tttgatgcttttattcatgacaaga

SEQ ID NO: 309319 - DNA, 25 bp, Probe Sequence
tttatgtccgtagttttatagtcct

SEQ ID NO: 309320 - DNA, 25 bp, Probe Sequence
ttttgtccacgtatctttgggtctt

SEQ ID NO: 309321 - DNA, 25 bp, Probe Sequence
tttctctaccccattttgtggtaat

SEQ ID NO: 309322 - DNA, 25 bp, Probe Sequence
tttcctaactccatcttagtgtata

SEQ ID NO: 309323 - DNA, 25 bp, Probe Sequence
tttccttttcagatgtggctggtca

SEQ ID NO: 309324 - DNA, 25 bp, Probe Sequence
tttcagcttttctacatttaggtaa

SEQ ID NO: 309325 - DNA, 25 bp, Probe Sequence
tttactccattcccagattagttat

SEQ ID NO: 309326 - DNA, 25 bp, Probe Sequence
tttcacctttctgcaacaagttagt

SEQ ID NO: 309327 - DNA, 25 bp, Probe Sequence
tttgcaagtttctcaaaatccatag

SEQ ID NO: 309328 - DNA, 25 bp, Probe Sequence
tttccagtgatacttcaagaagact

SEQ ID NO: 309329 - DNA, 25 bp, Probe Sequence
tttgaagtgtccttgtagatagact

SEQ ID NO: 309330 - DNA, 25 bp, Probe Sequence
tttgactctgttgagtacatatact

SEQ ID NO: 309331 - DNA, 25 bp, Probe Sequence
tttgtctcttcaccgtgttaacata

SEQ ID NO: 309332 - DNA, 25 bp, Probe Sequence
tttccctggcagagacgtaagcata

SEQ ID NO: 309333 - DNA, 25 bp, Probe Sequence
tttcccggagttcaggtgactgagg

SEQ ID NO: 309334 - DNA, 25 bp, Probe Sequence
tttccacagaatgatcaagttgacg

SEQ ID NO: 309335 - DNA, 25 bp, Probe Sequence
tttgccacaggaaatgacaggaagg

SEQ ID NO: 309336 - DNA, 25 bp, Probe Sequence
tttgccagcattgatgaacggatga

SEQ ID NO: 309337 - DNA, 25 bp, Probe Sequence
tttgaatgctgtgtgtgtcgcgggg

SEQ ID NO: 309338 - DNA, 25 bp, Probe Sequence
tttgagcagctggcgtgtgaggctg

SEQ ID NO: 309339 - DNA, 25 bp, Probe Sequence
tttgctggtgcacgtgtgtgcgcgc

SEQ ID NO: 309340 - DNA, 25 bp, Probe Sequence
tttgtttgcagctttctggcacata

SEQ ID NO: 309341 - DNA, 25 bp, Probe Sequence
tttgtattgcaattttggatgatta

SEQ ID NO: 309342 - DNA, 25 bp, Probe Sequence
tttgccaagaatgttttcattaatc

SEQ ID NO: 309343 - DNA, 25 bp, Probe Sequence
tttgccgtatagatttacaataatg

SEQ ID NO: 309344 - DNA, 25 bp, Probe Sequence
ttttctgttggtcttaactaatgta

SEQ ID NO: 309345 - DNA, 25 bp, Probe Sequence
tttgtttctgtaactggaactaaat

SEQ ID NO: 309346 - DNA, 25 bp, Probe Sequence
tttgttttggcacgcgaaagtcaac

SEQ ID NO: 309347 - DNA, 25 bp, Probe Sequence
tttgtttctggcatcctaaatcaac

SEQ ID NO: 309348 - DNA, 25 bp, Probe Sequence
tttgttgctcatgctgtttaagtgc

SEQ ID NO: 309349 - DNA, 25 bp, Probe Sequence
tttgcggtgagctatgtttacattg

SEQ ID NO: 309350 - DNA, 25 bp, Probe Sequence
tttcggatagcaatcttggacctga

SEQ ID NO: 309351 - DNA, 25 bp, Probe Sequence
tttccgtacctcctggaggatgaaa

SEQ ID NO: 309352 - DNA, 25 bp, Probe Sequence
tttccgtcatggcgctgaaggtagc

SEQ ID NO: 309353 - DNA, 25 bp, Probe Sequence
tttccgccggggtacaggtgtggat

SEQ ID NO: 309354 - DNA, 25 bp, Probe Sequence
tttcggacggatggatccctttcgt

SEQ ID NO: 309355 - DNA, 25 bp, Probe Sequence
tttccggcagaacgcatccactttc

SEQ ID NO: 309356 - DNA, 25 bp, Probe Sequence
tttccttcggaatccagtgcttcca

SEQ ID NO: 309357 - DNA, 25 bp, Probe Sequence
tttgttttggactctctgtggtccc

SEQ ID NO: 309358 - DNA, 25 bp, Probe Sequence
tttgtgctggggtatcctgtgtttc

SEQ ID NO: 309359 - DNA, 25 bp, Probe Sequence
tttgttattgtgtattatgttgttc

SEQ ID NO: 309360 - DNA, 25 bp, Probe Sequence
tttgttgatctttgattcttttatc

SEQ ID NO: 309361 - DNA, 25 bp, Probe Sequence
tttgattgatcagttcttttgtatg

SEQ ID NO: 309362 - DNA, 25 bp, Probe Sequence
tttgattgcactattatttgttgct

SEQ ID NO: 309363 - DNA, 25 bp, Probe Sequence
tttgtcaagctcatttcctggtatg

SEQ ID NO: 309364 - DNA, 25 bp, Probe Sequence
tttgctaagcatattttctctaggc

SEQ ID NO: 309365 - DNA, 25 bp, Probe Sequence
tttaacctatatttgtttagagcca

SEQ ID NO: 309366 - DNA, 25 bp, Probe Sequence
ttataactggatatttcttcaaaca

SEQ ID NO: 309367 - DNA, 25 bp, Probe Sequence
tttgaagctgaaacctctttaaatc

SEQ ID NO: 309368 - DNA, 25 bp, Probe Sequence
tttgccactgaatgccttctttcaa

SEQ ID NO: 309369 - DNA, 25 bp, Probe Sequence
tttgacatccagtcatggtttttaa

SEQ ID NO: 309370 - DNA, 25 bp, Probe Sequence
tttccattcatgacggtgattttcg

SEQ ID NO: 309371 - DNA, 25 bp, Probe Sequence
tttccattcagctcactgataacct

SEQ ID NO: 309372 - DNA, 25 bp, Probe Sequence
ttgtccctgcagtgcccataggccc

SEQ ID NO: 309373 - DNA, 25 bp, Probe Sequence
tttgtccgcatgttgtaatcgtgca

SEQ ID NO: 309374 - DNA, 25 bp, Probe Sequence
tttgatacagcgtctcttgtcttca

SEQ ID NO: 309375 - DNA, 25 bp, Probe Sequence
tttgatacatggactcagcccttcc

SEQ ID NO: 309376 - DNA, 25 bp, Probe Sequence
tttgagactagttcaggccttccag

SEQ ID NO: 309377 - DNA, 25 bp, Probe Sequence
tttcagcattagatgcaggtcgtac

SEQ ID NO: 309378 - DNA, 25 bp, Probe Sequence
tttcgcttaggccagagtgatggca

SEQ ID NO: 309379 - DNA, 25 bp, Probe Sequence
tttcggcgagacatggtgagcctcc

SEQ ID NO: 309380 - DNA, 25 bp, Probe Sequence
tttcggcgagacatggtgagcctcc

SEQ ID NO: 309381 - DNA, 25 bp, Probe Sequence
tttgctgggggcaaggtgtctctgc

SEQ ID NO: 309382 - DNA, 25 bp, Probe Sequence
tttctgtgggttttgtgttgtcttt

SEQ ID NO: 309383 - DNA, 25 bp, Probe Sequence
tttgttgtgtgtatgctgcttttct

SEQ ID NO: 309384 - DNA, 25 bp, Probe Sequence
tttgccgtggataggcgcttttatt

SEQ ID NO: 309385 - DNA, 25 bp, Probe Sequence
tttgccttagcacacgttttatgga

SEQ ID NO: 309386 - DNA, 25 bp, Probe Sequence
ttatccgctactctttatttcatgg

SEQ ID NO: 309387 - DNA, 25 bp, Probe Sequence
tttccgtttttgttcattttggatg

SEQ ID NO: 309388 - DNA, 25 bp, Probe Sequence
tttccagattttagtctcctttctc

SEQ ID NO: 309389 - DNA, 25 bp, Probe Sequence
tttccagttttccacaaatacttga

SEQ ID NO: 309390 - DNA, 25 bp, Probe Sequence
tttgcctttttgtaattctatttga

SEQ ID NO: 309391 - DNA, 25 bp, Probe Sequence
tttctgtttattgaacctctttatt

SEQ ID NO: 309392 - DNA, 25 bp, Probe Sequence
ttttgttaagttcagccattattac

SEQ ID NO: 309393 - DNA, 25 bp, Probe Sequence
tttcttaaaattcacacgtcaatag

SEQ ID NO: 309394 - DNA, 25 bp, Probe Sequence
tttctccaagaaagccaacaaccac

SEQ ID NO: 309395 - DNA, 25 bp, Probe Sequence
tttccgaaataagctcaaactctta

SEQ ID NO: 309396 - DNA, 25 bp, Probe Sequence
tttcagagcataaaacctaaaggtt

SEQ ID NO: 309397 - DNA, 25 bp, Probe Sequence
tttcgccttaaactctggacactct

SEQ ID NO: 309398 - DNA, 25 bp, Probe Sequence
tttcgccttaaactctggacactct

SEQ ID NO: 309399 - DNA, 25 bp, Probe Sequence
tttctcctatggatcgcttacacct

SEQ ID NO: 309400 - DNA, 25 bp, Probe Sequence
tttaggctctggagcctctcaccac

SEQ ID NO: 309401 - DNA, 25 bp, Probe Sequence
tttccgagtgtgagcacagctccct

SEQ ID NO: 309402 - DNA, 25 bp, Probe Sequence
tttccatagtttgatagtgccactt

SEQ ID NO: 309403 - DNA, 25 bp, Probe Sequence
tttcgacaaggtcattgtgccctgc

SEQ ID NO: 309404 - DNA, 25 bp, Probe Sequence
tttcaaagaccacgttaagcctgcc

SEQ ID NO: 309405 - DNA, 25 bp, Probe Sequence
tttcacaagacctccacaggagccc

SEQ ID NO: 309406 - DNA, 25 bp, Probe Sequence
ttgtgccaaacctgacctgaggggc

SEQ ID NO: 309407 - DNA, 25 bp, Probe Sequence
tttgtacaaataaacctgaggcagg

SEQ ID NO: 309408 - DNA, 25 bp, Probe Sequence
tttgctacgaacaaaacgcagcgca

SEQ ID NO: 309409 - DNA, 25 bp, Probe Sequence
tttgaggcagaacgcaacgccagcc

SEQ ID NO: 309410 - DNA, 25 bp, Probe Sequence
tttgagagagattctgcctctgtct

SEQ ID NO: 309411 - DNA, 25 bp, Probe Sequence
tttgagagcaccgatggcctcatct

SEQ ID NO: 309412 - DNA, 25 bp, Probe Sequence
tttgagacatcactggcctataata

SEQ ID NO: 309413 - DNA, 25 bp, Probe Sequence
tttaaatcagcttagcccaaagggg

SEQ ID NO: 309414 - DNA, 25 bp, Probe Sequence
tttgttcatcaaaagcccagaaggc

SEQ ID NO: 309415 - DNA, 25 bp, Probe Sequence
tttgtttcaatgccccaaacaggcc

SEQ ID NO: 309416 - DNA, 25 bp, Probe Sequence
tttgtttgaatgcctctaaagccca

SEQ ID NO: 309417 - DNA, 25 bp, Probe Sequence
tttgctttgggggtagaggcttctt

SEQ ID NO: 309418 - DNA, 25 bp, Probe Sequence
tttgagcttggaggctttagtcatt

SEQ ID NO: 309419 - DNA, 25 bp, Probe Sequence
tttgatggtgtggagccggagcctt

SEQ ID NO: 309420 - DNA, 25 bp, Probe Sequence
tttgactatgctgagctcatgggcc

SEQ ID NO: 309421 - DNA, 25 bp, Probe Sequence
tttgacctgctggtcatcatgttcc

SEQ ID NO: 309422 - DNA, 25 bp, Probe Sequence
tttgaaccacagccatcagttccca

SEQ ID NO: 309423 - DNA, 25 bp, Probe Sequence
tttacacagaagccaagcgtcctcc

SEQ ID NO: 309424 - DNA, 25 bp, Probe Sequence
tttgacacagtgaacaagacccccc

SEQ ID NO: 309425 - DNA, 25 bp, Probe Sequence
tttgaacatacaaaacccaccccat

SEQ ID NO: 309426 - DNA, 25 bp, Probe Sequence
tttaagggctaatctcacacctcct

SEQ ID NO: 309427 - DNA, 25 bp, Probe Sequence
tttgaagtcgaaaaatacattgtcc

SEQ ID NO: 309428 - DNA, 25 bp, Probe Sequence
tttgagagtgggcgagtgagttgac

SEQ ID NO: 309429 - DNA, 25 bp, Probe Sequence
tttatgagtgtgtctctggattttg

SEQ ID NO: 309430 - DNA, 25 bp, Probe Sequence
tttataggtgcattctggttacttg

SEQ ID NO: 309431 - DNA, 25 bp, Probe Sequence
tttgataggccatgccttgccactt

SEQ ID NO: 309432 - DNA, 25 bp, Probe Sequence
tttgctgaggaatgccttcaagcac

SEQ ID NO: 309433 - DNA, 25 bp, Probe Sequence
tttgctgagtgttccgtgtgccagc

SEQ ID NO: 309434 - DNA, 25 bp, Probe Sequence
tttatagattacactggccaccagc

SEQ ID NO: 309435 - DNA, 25 bp, Probe Sequence
tttctacacagacacggcaaccatc

SEQ ID NO: 309436 - DNA, 25 bp, Probe Sequence
tttctacacagacacggcaaccatc

SEQ ID NO: 309437 - DNA, 25 bp, Probe Sequence
ttggctaccaacccaaaaccatcaa

SEQ ID NO: 309438 - DNA, 25 bp, Probe Sequence
tttgaacccctggaaacactcatgc

SEQ ID NO: 309439 - DNA, 25 bp, Probe Sequence
tttgaaagcccgtctattcctatgc

SEQ ID NO: 309440 - DNA, 25 bp, Probe Sequence
tttgaatcctgcctgaatactcgta

SEQ ID NO: 309441 - DNA, 25 bp, Probe Sequence
tttgaggtgctgggcattcccttca

SEQ ID NO: 309442 - DNA, 25 bp, Probe Sequence
tttaactcatatgatctcccttcag

SEQ ID NO: 309443 - DNA, 25 bp, Probe Sequence
tttaatcatctatattcacctaacc

SEQ ID NO: 309444 - DNA, 25 bp, Probe Sequence
tttcaagactgattataaagctaca

SEQ ID NO: 309445 - DNA, 25 bp, Probe Sequence
tttgcactgactttatccagaccaa

SEQ ID NO: 309446 - DNA, 25 bp, Probe Sequence
tttgactgacaattcattttacact

SEQ ID NO: 309447 - DNA, 25 bp, Probe Sequence
tttgcactatactctttttcagcag

SEQ ID NO: 309448 - DNA, 25 bp, Probe Sequence
tttgctctttctcattgtatgtcta

SEQ ID NO: 309449 - DNA, 25 bp, Probe Sequence
tttgcatgtttttactgatcattcg

SEQ ID NO: 309450 - DNA, 25 bp, Probe Sequence
tttgcaaattcttagccatgtgatc

SEQ ID NO: 309451 - DNA, 25 bp, Probe Sequence
tttgactatttctgtatgtctccat

SEQ ID NO: 309452 - DNA, 25 bp, Probe Sequence
tttgttactgttgtcattatcacat

SEQ ID NO: 309453 - DNA, 25 bp, Probe Sequence
tttgctgtgacacttcttcatctca

SEQ ID NO: 309454 - DNA, 25 bp, Probe Sequence
tttgatggaatcactgtgcaccagt

SEQ ID NO: 309455 - DNA, 25 bp, Probe Sequence
tttgccgatatggagctgctgagcc

SEQ ID NO: 309456 - DNA, 25 bp, Probe Sequence
tttcctatcatggagcatgaaccag

SEQ ID NO: 309457 - DNA, 25 bp, Probe Sequence
tttgcagcttgcggcggaatcacag

SEQ ID NO: 309458 - DNA, 25 bp, Probe Sequence
tttgcatctctggacaaatacacaa

SEQ ID NO: 309459 - DNA, 25 bp, Probe Sequence
tttgcattgtatagttataccacag

SEQ ID NO: 309460 - DNA, 25 bp, Probe Sequence
tttctgagaaacatatatctacatg

SEQ ID NO: 309461 - DNA, 25 bp, Probe Sequence
tttgctgatgaaacactgacctctt

SEQ ID NO: 309462 - DNA, 25 bp, Probe Sequence
tttccacaaaccaccatctattttg

SEQ ID NO: 309463 - DNA, 25 bp, Probe Sequence
tttccaagaacccaaactgcctttg

SEQ ID NO: 309464 - DNA, 25 bp, Probe Sequence
tttctaagatacggactcagctggt

SEQ ID NO: 309465 - DNA, 25 bp, Probe Sequence
tttatatagaggagacaagtcgtaa

SEQ ID NO: 309466 - DNA, 25 bp, Probe Sequence
tttgaaagggatcatcatgcagctc

SEQ ID NO: 309467 - DNA, 25 bp, Probe Sequence
tttgcaacgcggaatatcacaccgg

SEQ ID NO: 309468 - DNA, 25 bp, Probe Sequence
tttgcacgctggcctatatatcagg

SEQ ID NO: 309469 - DNA, 25 bp, Probe Sequence
tttgatcgatggctgaatacccccg

SEQ ID NO: 309470 - DNA, 25 bp, Probe Sequence
ttttcgtcgggatccccgcaaggat

SEQ ID NO: 309471 - DNA, 25 bp, Probe Sequence
ttttagtggggttggccccatgaag

SEQ ID NO: 309472 - DNA, 25 bp, Probe Sequence
ttttagtggggttggccccatgaag

SEQ ID NO: 309473 - DNA, 25 bp, Probe Sequence
tttccctggggagccccaagaacag

SEQ ID NO: 309474 - DNA, 25 bp, Probe Sequence
tttccctgatggacaccagcggcaa

SEQ ID NO: 309475 - DNA, 25 bp, Probe Sequence
tttgctgaatgcttgctacgagcgg

SEQ ID NO: 309476 - DNA, 25 bp, Probe Sequence
ttattgcagatgtctttagaggctc

SEQ ID NO: 309477 - DNA, 25 bp, Probe Sequence
tttgctctgcatttttgatgatggt

SEQ ID NO: 309478 - DNA, 25 bp, Probe Sequence
tttgctccaccttcatattggctag

SEQ ID NO: 309479 - DNA, 25 bp, Probe Sequence
tttcatcagccggattttgttattg

SEQ ID NO: 309480 - DNA, 25 bp, Probe Sequence
ttttacctggtgatgcgttttggca

SEQ ID NO: 309481 - DNA, 25 bp, Probe Sequence
ttctaacccagggcatggggttggg

SEQ ID NO: 309482 - DNA, 25 bp, Probe Sequence
ttgtaacccaggagcgaagttgcag

SEQ ID NO: 309483 - DNA, 25 bp, Probe Sequence
tttattcccttgttagcaagttcag

SEQ ID NO: 309484 - DNA, 25 bp, Probe Sequence
tttacaaccttgttaaggctcttgt

SEQ ID NO: 309485 - DNA, 25 bp, Probe Sequence
tttataacgttctcagtcctttgtt

SEQ ID NO: 309486 - DNA, 25 bp, Probe Sequence
ttgttgttttacccattcgttatct

SEQ ID NO: 309487 - DNA, 25 bp, Probe Sequence
ttttcatggtttgccttccttattt

SEQ ID NO: 309488 - DNA, 25 bp, Probe Sequence
tttccatttttctccatggtgtttt

SEQ ID NO: 309489 - DNA, 25 bp, Probe Sequence
tttcctttgtccatcgaggtgtttc

SEQ ID NO: 309490 - DNA, 25 bp, Probe Sequence
tttgcctgcttggcctatcaaggta

SEQ ID NO: 309491 - DNA, 25 bp, Probe Sequence
tttgacttcatgtctcatatccagg

SEQ ID NO: 309492 - DNA, 25 bp, Probe Sequence
tttcactgcctgtcactgatcagca

SEQ ID NO: 309493 - DNA, 25 bp, Probe Sequence
tttgcctgtctgtcaagctcagagc

SEQ ID NO: 309494 - DNA, 25 bp, Probe Sequence
tttcacttgctgtaaatctactact

SEQ ID NO: 309495 - DNA, 25 bp, Probe Sequence
tttctcatttgccaataataatacc

SEQ ID NO: 309496 - DNA, 25 bp, Probe Sequence
ttttctttattgtgtaatactacct

SEQ ID NO: 309497 - DNA, 25 bp, Probe Sequence
tttgttctttttattgaatctattt

SEQ ID NO: 309498 - DNA, 25 bp, Probe Sequence
tttactttttttgtggacacttctg

SEQ ID NO: 309499 - DNA, 25 bp, Probe Sequence
tttttttttttgaggcagagtcttg

SEQ ID NO: 309500 - DNA, 25 bp, Probe Sequence
tttgtttttttttgagatggagtct

SEQ ID NO: 309501 - DNA, 25 bp, Probe Sequence
tttcatttttttccaggctggttcg

SEQ ID NO: 309502 - DNA, 25 bp, Probe Sequence
tttcagttcctttctaagctttgtc

SEQ ID NO: 309503 - DNA, 25 bp, Probe Sequence
tttcctaccttctttacatgttgtg

SEQ ID NO: 309504 - DNA, 25 bp, Probe Sequence
tttcctcctttctctgtatattggg

SEQ ID NO: 309505 - DNA, 25 bp, Probe Sequence
tttcacatagatgtccctttcttgg

SEQ ID NO: 309506 - DNA, 25 bp, Probe Sequence
tttcctaaagtcccatacatttgga

SEQ ID NO: 309507 - DNA, 25 bp, Probe Sequence
tttcttaattccccaaatcttggct

SEQ ID NO: 309508 - DNA, 25 bp, Probe Sequence
tttcctatgcataaccacaaattta

SEQ ID NO: 309509 - DNA, 25 bp, Probe Sequence
tttccttccacactaacgtgcttga

SEQ ID NO: 309510 - DNA, 25 bp, Probe Sequence
tttactctcccactgaagcaggtta

SEQ ID NO: 309511 - DNA, 25 bp, Probe Sequence
tttccctctccttgtagtggtcaag

SEQ ID NO: 309512 - DNA, 25 bp, Probe Sequence
tttcttcagcttcttagtggctacg

SEQ ID NO: 309513 - DNA, 25 bp, Probe Sequence
tttcagtcacttcttgttgcaatta

SEQ ID NO: 309514 - DNA, 25 bp, Probe Sequence
tttgaagcaactcatcgattgattt

SEQ ID NO: 309515 - DNA, 25 bp, Probe Sequence
tttcaacaagcacgaccatggatga

SEQ ID NO: 309516 - DNA, 25 bp, Probe Sequence
tttctagctagcagaattgtgagcc

SEQ ID NO: 309517 - DNA, 25 bp, Probe Sequence
tttccaggacagcaattgtggtaga

SEQ ID NO: 309518 - DNA, 25 bp, Probe Sequence
tttctaggggaatctctgtgatagt

SEQ ID NO: 309519 - DNA, 25 bp, Probe Sequence
ttttaggccacagtgacctgcgcaa

SEQ ID NO: 309520 - DNA, 25 bp, Probe Sequence
ttttaggccacagtgacctgcgcaa

SEQ ID NO: 309521 - DNA, 25 bp, Probe Sequence
ttttaggccacagtgacctgcgcaa

SEQ ID NO: 309522 - DNA, 25 bp, Probe Sequence
tttctcttccaagtgcccagaacag

SEQ ID NO: 309523 - DNA, 25 bp, Probe Sequence
tttgctcttcaaacctcctgtagag

SEQ ID NO: 309524 - DNA, 25 bp, Probe Sequence
tttgcctgacacatcgttgcttcag

SEQ ID NO: 309525 - DNA, 25 bp, Probe Sequence
tttgattcacacaaagcttgcttca

SEQ ID NO: 309526 - DNA, 25 bp, Probe Sequence
tttgcaaatctaaagttgctccata

SEQ ID NO: 309527 - DNA, 25 bp, Probe Sequence
tttgcaattcaaacacgtatccata

SEQ ID NO: 309528 - DNA, 25 bp, Probe Sequence
tttgcatgttcaaaatggaagccat

SEQ ID NO: 309529 - DNA, 25 bp, Probe Sequence
ttatgctttcaaaatcaacgtttaa

SEQ ID NO: 309530 - DNA, 25 bp, Probe Sequence
tttgccttcagtaatccccttaagg

SEQ ID NO: 309531 - DNA, 25 bp, Probe Sequence
ttatggcccagtacaagaccttaag

SEQ ID NO: 309532 - DNA, 25 bp, Probe Sequence
ttagctaccgtaaaggctcatccaa

SEQ ID NO: 309533 - DNA, 25 bp, Probe Sequence
tttctaccgttaagagacatccagc

SEQ ID NO: 309534 - DNA, 25 bp, Probe Sequence
tttgttgtcgttttaacatctccac

SEQ ID NO: 309535 - DNA, 25 bp, Probe Sequence
tttgttcttttcttaagctcccaat

SEQ ID NO: 309536 - DNA, 25 bp, Probe Sequence
tttgattttttgctgcagactcatc

SEQ ID NO: 309537 - DNA, 25 bp, Probe Sequence
tttgttgttttgcaggtctagcaga

SEQ ID NO: 309538 - DNA, 25 bp, Probe Sequence
tttgcgtggtccttaggcttacaat

SEQ ID NO: 309539 - DNA, 25 bp, Probe Sequence
tttcactttctgtctaggttaaagc

SEQ ID NO: 309540 - DNA, 25 bp, Probe Sequence
ttcctcttacttcaatttgaaccca

SEQ ID NO: 309541 - DNA, 25 bp, Probe Sequence
tttctttacttcccaaaacatcctg

SEQ ID NO: 309542 - DNA, 25 bp, Probe Sequence
tttccttgctttgttaaccatcacg

SEQ ID NO: 309543 - DNA, 25 bp, Probe Sequence
tttccttgtactgatataaacactt

SEQ ID NO: 309544 - DNA, 25 bp, Probe Sequence
tttcccttttagttaagcatgactt

SEQ ID NO: 309545 - DNA, 25 bp, Probe Sequence
tttcccttttagaatacattaaatg

SEQ ID NO: 309546 - DNA, 25 bp, Probe Sequence
tttccccttctaacatccttagagg

SEQ ID NO: 309547 - DNA, 25 bp, Probe Sequence
tttccctaatccaatttttagagtg

SEQ ID NO: 309548 - DNA, 25 bp, Probe Sequence
tttcccccaagcatattttcttgta

SEQ ID NO: 309549 - DNA, 25 bp, Probe Sequence
tttgcccgtcaagttatttactgtt

SEQ ID NO: 309550 - DNA, 25 bp, Probe Sequence
tttgcccgttcagctttatgggatt

SEQ ID NO: 309551 - DNA, 25 bp, Probe Sequence
tttcccaggagagctctgtcaggtg

SEQ ID NO: 309552 - DNA, 25 bp, Probe Sequence
tttccaagcaaagtctgctcgagga

SEQ ID NO: 309553 - DNA, 25 bp, Probe Sequence
ttctccaaaaagtgcaccaggaagg

SEQ ID NO: 309554 - DNA, 25 bp, Probe Sequence
ttccctaaagaaaacaccgtagctg

SEQ ID NO: 309555 - DNA, 25 bp, Probe Sequence
ttccctttaaaatgaccatgtagtg

SEQ ID NO: 309556 - DNA, 25 bp, Probe Sequence
tttccttctaagaaaaccaggcctg

SEQ ID NO: 309557 - DNA, 25 bp, Probe Sequence
tttcctgtttgaaaaactactcact

SEQ ID NO: 309558 - DNA, 25 bp, Probe Sequence
tttccagtttaagtaattgcctaca

SEQ ID NO: 309559 - DNA, 25 bp, Probe Sequence
tttccagtttaagtaattgcctaca

SEQ ID NO: 309560 - DNA, 25 bp, Probe Sequence
tttccaatgttgtaacaactccgcc

SEQ ID NO: 309561 - DNA, 25 bp, Probe Sequence
tttccaaatgtcgtacaactccgcc

SEQ ID NO: 309562 - DNA, 25 bp, Probe Sequence
tttccagaatgcattaacccactcc

SEQ ID NO: 309563 - DNA, 25 bp, Probe Sequence
tttccaatgtgttaatacccctcct

SEQ ID NO: 309564 - DNA, 25 bp, Probe Sequence
tttcagaatgtagcactcacgccct

SEQ ID NO: 309565 - DNA, 25 bp, Probe Sequence
tttcagaatgtagcactcacgccct

SEQ ID NO: 309566 - DNA, 25 bp, Probe Sequence
tttagaatgccaccccaaaaatgcc

SEQ ID NO: 309567 - DNA, 25 bp, Probe Sequence
tttgacagagcctacccaaataaga

SEQ ID NO: 309568 - DNA, 25 bp, Probe Sequence
tttacaggtgcagtcaccgaaagag

SEQ ID NO: 309569 - DNA, 25 bp, Probe Sequence
tttgcaagtctaacctctgaacata

SEQ ID NO: 309570 - DNA, 25 bp, Probe Sequence
tttccagcctgaagcctgcttaaac

SEQ ID NO: 309571 - DNA, 25 bp, Probe Sequence
tttgactcctgctcccattaggagc

SEQ ID NO: 309572 - DNA, 25 bp, Probe Sequence
tttactgccttaacctgtagtgcgt

SEQ ID NO: 309573 - DNA, 25 bp, Probe Sequence
tttcaactcctcaagccgtaatgtt

SEQ ID NO: 309574 - DNA, 25 bp, Probe Sequence
tttgcaactttcaagtgcgttcttt

SEQ ID NO: 309575 - DNA, 25 bp, Probe Sequence
tttgaacccatttgaggttcttcag

SEQ ID NO: 309576 - DNA, 25 bp, Probe Sequence
tttaataggtcttgcaatttttcac

SEQ ID NO: 309577 - DNA, 25 bp, Probe Sequence
tttgaaggactctaattgtctttcc

SEQ ID NO: 309578 - DNA, 25 bp, Probe Sequence
tttgcaagggttacacatttcactg

SEQ ID NO: 309579 - DNA, 25 bp, Probe Sequence
tttgcacagaggcatactgctccta

SEQ ID NO: 309580 - DNA, 25 bp, Probe Sequence
tttgcatgacaatgatactggacta

SEQ ID NO: 309581 - DNA, 25 bp, Probe Sequence
tttgctcacgcatgtatgcttagta

SEQ ID NO: 309582 - DNA, 25 bp, Probe Sequence
tttccattgcaatttctgtggctga

SEQ ID NO: 309583 - DNA, 25 bp, Probe Sequence
tttccattgcaatttctgtggctga

SEQ ID NO: 309584 - DNA, 25 bp, Probe Sequence
tttcctgctttcttcgtggtaggtt

SEQ ID NO: 309585 - DNA, 25 bp, Probe Sequence
tttccctgcttttgagatagtagga

SEQ ID NO: 309586 - DNA, 25 bp, Probe Sequence
tttccgcctctttgagaccaagatc

SEQ ID NO: 309587 - DNA, 25 bp, Probe Sequence
tttccgcctctttgagaccaagatc

SEQ ID NO: 309588 - DNA, 25 bp, Probe Sequence
ttacctgccttgaaggaccgaaaat

SEQ ID NO: 309589 - DNA, 25 bp, Probe Sequence
tttcctgaatttcctacctaaatat

SEQ ID NO: 309590 - DNA, 25 bp, Probe Sequence
tttctgcaaattattcagcctccaa

SEQ ID NO: 309591 - DNA, 25 bp, Probe Sequence
tttccaaattctttactgtccaatt

SEQ ID NO: 309592 - DNA, 25 bp, Probe Sequence
tttcccacaatcaaatatcactccc

SEQ ID NO: 309593 - DNA, 25 bp, Probe Sequence
tttccaaagatcataatcactcaac

SEQ ID NO: 309594 - DNA, 25 bp, Probe Sequence
tttcctaagcactaaatgactcata

SEQ ID NO: 309595 - DNA, 25 bp, Probe Sequence
tttgctgtatgaccttgcacaagtc

SEQ ID NO: 309596 - DNA, 25 bp, Probe Sequence
tttctgagcatacctggaaaatgct

SEQ ID NO: 309597 - DNA, 25 bp, Probe Sequence
tttctggtactctgtgaaagaagag

SEQ ID NO: 309598 - DNA, 25 bp, Probe Sequence
tttgctgggacataacatccagaag

SEQ ID NO: 309599 - DNA, 25 bp, Probe Sequence
tttcgggtccaaaatctcatgaatg

SEQ ID NO: 309600 - DNA, 25 bp, Probe Sequence
tttcctgcgcaccttataccagaat

SEQ ID NO: 309601 - DNA, 25 bp, Probe Sequence
tttccccacagtgcaattcagaata

SEQ ID NO: 309602 - DNA, 25 bp, Probe Sequence
tttctccaacgtgcacagtcaatga

SEQ ID NO: 309603 - DNA, 25 bp, Probe Sequence
tttgcccgcaaggccctgaatgatg

SEQ ID NO: 309604 - DNA, 25 bp, Probe Sequence
ttttgggacagctccatgggcatgg

SEQ ID NO: 309605 - DNA, 25 bp, Probe Sequence
tttatggagggctctctttctgggc

SEQ ID NO: 309606 - DNA, 25 bp, Probe Sequence
tttctcagggagctctcttttgggc

SEQ ID NO: 309607 - DNA, 25 bp, Probe Sequence
tttccaggggaattgttgcaatgga

SEQ ID NO: 309608 - DNA, 25 bp, Probe Sequence
tttccaggggtcagtctgtcaggca

SEQ ID NO: 309609 - DNA, 25 bp, Probe Sequence
tttccagggtttaagcattgcttgc

SEQ ID NO: 309610 - DNA, 25 bp, Probe Sequence
tttgcacagtgcctttacagattta

SEQ ID NO: 309611 - DNA, 25 bp, Probe Sequence
tttgcactctgccttaaagattgaa

SEQ ID NO: 309612 - DNA, 25 bp, Probe Sequence
tttgcacctgcctgaaatatacaca

SEQ ID NO: 309613 - DNA, 25 bp, Probe Sequence
tttccatcataattctaatctaaca

SEQ ID NO: 309614 - DNA, 25 bp, Probe Sequence
tttcctcaggagtcaaatttaattt

SEQ ID NO: 309615 - DNA, 25 bp, Probe Sequence
tttcccagatggtacaattgtcaga

SEQ ID NO: 309616 - DNA, 25 bp, Probe Sequence
tttccacagtgactacagagtctca

SEQ ID NO: 309617 - DNA, 25 bp, Probe Sequence
tttcaaaagcactacaggcccatga

SEQ ID NO: 309618 - DNA, 25 bp, Probe Sequence
tttctgaacacctatgcaggtctta

SEQ ID NO: 309619 - DNA, 25 bp, Probe Sequence
tttctggtcccttcagtatcttcaa

SEQ ID NO: 309620 - DNA, 25 bp, Probe Sequence
tttctggtcccttcagtatcttcaa

SEQ ID NO: 309621 - DNA, 25 bp, Probe Sequence
tttctggtcccttcagtatcttcaa

SEQ ID NO: 309622 - DNA, 25 bp, Probe Sequence
tttctggttctttctcaacattgcc

SEQ ID NO: 309623 - DNA, 25 bp, Probe Sequence
tttctggtgctgttctccagttcac

SEQ ID NO: 309624 - DNA, 25 bp, Probe Sequence
tttctggctgaggttctgagggcac

SEQ ID NO: 309625 - DNA, 25 bp, Probe Sequence
tttctggctgaggttctgagggcac

SEQ ID NO: 309626 - DNA, 25 bp, Probe Sequence
tttgcggttgtgatgcatagtggca

SEQ ID NO: 309627 - DNA, 25 bp, Probe Sequence
tttgcggcatgtgaccatcattgaa

SEQ ID NO: 309628 - DNA, 25 bp, Probe Sequence
tttgcagacaaggatcttctggaac

SEQ ID NO: 309629 - DNA, 25 bp, Probe Sequence
tttgctatcaagaactccggacctt

SEQ ID NO: 309630 - DNA, 25 bp, Probe Sequence
ttatcttctatatcttcaggcgcgc

SEQ ID NO: 309631 - DNA, 25 bp, Probe Sequence
ttatttcaggcatcttactccgtga

SEQ ID NO: 309632 - DNA, 25 bp, Probe Sequence
ttttcctggacacttactggcatgg

SEQ ID NO: 309633 - DNA, 25 bp, Probe Sequence
tttcctcggagacgggtggcatggg

SEQ ID NO: 309634 - DNA, 25 bp, Probe Sequence
tttcctcggagacgggtggcatggg

SEQ ID NO: 309635 - DNA, 25 bp, Probe Sequence
tttcagctgggttggggtggatgca

SEQ ID NO: 309636 - DNA, 25 bp, Probe Sequence
tttctctgagcagtcagggtgggaa

SEQ ID NO: 309637 - DNA, 25 bp, Probe Sequence
tttgcttgacgatttcatgacggaa

SEQ ID NO: 309638 - DNA, 25 bp, Probe Sequence
tttgcattccaatttcatgttgatg

SEQ ID NO: 309639 - DNA, 25 bp, Probe Sequence
tttgcatggcaaattgatttcaatg

SEQ ID NO: 309640 - DNA, 25 bp, Probe Sequence
tttctgccacagatgattccctgca

SEQ ID NO: 309641 - DNA, 25 bp, Probe Sequence
tttctgctccgtcattgcattcgga

SEQ ID NO: 309642 - DNA, 25 bp, Probe Sequence
tttctgttccatccattcgtgagga

SEQ ID NO: 309643 - DNA, 25 bp, Probe Sequence
tttcagttgccctaacatgttctaa

SEQ ID NO: 309644 - DNA, 25 bp, Probe Sequence
tttagttcccagcctgatttctgaa

SEQ ID NO: 309645 - DNA, 25 bp, Probe Sequence
tttccttaccacatatatactagat

SEQ ID NO: 309646 - DNA, 25 bp, Probe Sequence
tttccttagacatttaaatttcaag

SEQ ID NO: 309647 - DNA, 25 bp, Probe Sequence
tttcctttcactttacagatgtaaa

SEQ ID NO: 309648 - DNA, 25 bp, Probe Sequence
tttctctttactgccacaggctaag

SEQ ID NO: 309649 - DNA, 25 bp, Probe Sequence
tttctggccttcacccagacgaaga

SEQ ID NO: 309650 - DNA, 25 bp, Probe Sequence
tttgcttctgttgtccactgattaa

SEQ ID NO: 309651 - DNA, 25 bp, Probe Sequence
tttgctatcctttttactgtaaaat

SEQ ID NO: 309652 - DNA, 25 bp, Probe Sequence
tttgctttatattttactttacatt

SEQ ID NO: 309653 - DNA, 25 bp, Probe Sequence
tttgcttttggttcatattttggtt

SEQ ID NO: 309654 - DNA, 25 bp, Probe Sequence
tttgctttgggctctgctatttgtt

SEQ ID NO: 309655 - DNA, 25 bp, Probe Sequence
tttgcttagtcgtgtgttggctgct

SEQ ID NO: 309656 - DNA, 25 bp, Probe Sequence
tttgctttgatttttgcttggcctc

SEQ ID NO: 309657 - DNA, 25 bp, Probe Sequence
tttgaatgatgagccttcgtgcccc

SEQ ID NO: 309658 - DNA, 25 bp, Probe Sequence
tttgaatgatgagccttcgtgcccc

SEQ ID NO: 309659 - DNA, 25 bp, Probe Sequence
tttgagcagatagctattcattcca

SEQ ID NO: 309660 - DNA, 25 bp, Probe Sequence
tttcatcatatctctttgcataccc

SEQ ID NO: 309661 - DNA, 25 bp, Probe Sequence
tttgcaagtcatgcttttcacccta

SEQ ID NO: 309662 - DNA, 25 bp, Probe Sequence
tttgcatacattgaggttcactctt

SEQ ID NO: 309663 - DNA, 25 bp, Probe Sequence
tttcaccagctgcagggtctgcttt

SEQ ID NO: 309664 - DNA, 25 bp, Probe Sequence
tttgcaccacttgtggcttttgaat

SEQ ID NO: 309665 - DNA, 25 bp, Probe Sequence
tttcctacttccttgtctttgaaat

SEQ ID NO: 309666 - DNA, 25 bp, Probe Sequence
tttcctacagtgcccttggttaaat

SEQ ID NO: 309667 - DNA, 25 bp, Probe Sequence
tttctatatagttccttgccttaat

SEQ ID NO: 309668 - DNA, 25 bp, Probe Sequence
tttctcattagccccttttaatttg

SEQ ID NO: 309669 - DNA, 25 bp, Probe Sequence
ttttttataccctctatattatttg

SEQ ID NO: 309670 - DNA, 25 bp, Probe Sequence
ttttgtaagattgccctaggtatta

SEQ ID NO: 309671 - DNA, 25 bp, Probe Sequence
tttataaggcttatttgtggcttta

SEQ ID NO: 309672 - DNA, 25 bp, Probe Sequence
tttaaatcgcctttgtatctcctta

SEQ ID NO: 309673 - DNA, 25 bp, Probe Sequence
tttgaaatgctggcactgtctatct

SEQ ID NO: 309674 - DNA, 25 bp, Probe Sequence
tttgacgctggggctggcattgccc

SEQ ID NO: 309675 - DNA, 25 bp, Probe Sequence
tttgacgctggggctggcattgccc

SEQ ID NO: 309676 - DNA, 25 bp, Probe Sequence
tttacaggagtgtcggctgtgcccc

SEQ ID NO: 309677 - DNA, 25 bp, Probe Sequence
tttgaaggagttcgacttggatgcc

SEQ ID NO: 309678 - DNA, 25 bp, Probe Sequence
tttccacatctgtcttcattagcag

SEQ ID NO: 309679 - DNA, 25 bp, Probe Sequence
tttcccagttattcaaagcagcttt

SEQ ID NO: 309680 - DNA, 25 bp, Probe Sequence
tttcccattgaatagaagccagttt

SEQ ID NO: 309681 - DNA, 25 bp, Probe Sequence
tttcccattgacgtacaatgggtgg

SEQ ID NO: 309682 - DNA, 25 bp, Probe Sequence
tttccgttgacgtcaatgtggtgga

SEQ ID NO: 309683 - DNA, 25 bp, Probe Sequence
tttcccctgagcaccgtgagtgaga

SEQ ID NO: 309684 - DNA, 25 bp, Probe Sequence
tttccggctggaaccatggagggtg

SEQ ID NO: 309685 - DNA, 25 bp, Probe Sequence
tttccgcctggaacctgagagcgag

SEQ ID NO: 309686 - DNA, 25 bp, Probe Sequence
tttcccttggatcagccaagcgaaa

SEQ ID NO: 309687 - DNA, 25 bp, Probe Sequence
tttcctgttgtacacacaagggcca

SEQ ID NO: 309688 - DNA, 25 bp, Probe Sequence
tttatcgtcaaacaccaagccaggc

SEQ ID NO: 309689 - DNA, 25 bp, Probe Sequence
ttttggcaaaatccccagagccaag

SEQ ID NO: 309690 - DNA, 25 bp, Probe Sequence
tttttggaaacctctgcgccatgag

SEQ ID NO: 309691 - DNA, 25 bp, Probe Sequence
tttcgtgggaacaactgggcctggg

SEQ ID NO: 309692 - DNA, 25 bp, Probe Sequence
tttcgtgggaacaactgggcctggg

SEQ ID NO: 309693 - DNA, 25 bp, Probe Sequence
tttagtaaggacacaggagagcttg

SEQ ID NO: 309694 - DNA, 25 bp, Probe Sequence
tttgcagtaagggacccgaacactg

SEQ ID NO: 309695 - DNA, 25 bp, Probe Sequence
tttgaataaagtgtcactaagcagt

SEQ ID NO: 309696 - DNA, 25 bp, Probe Sequence
tttaatgacctgggtcttaaggatt

SEQ ID NO: 309697 - DNA, 25 bp, Probe Sequence
ttgaagtggttgtgttgtagggttg

SEQ ID NO: 309698 - DNA, 25 bp, Probe Sequence
ttagactagtggttctggtagggct

SEQ ID NO: 309699 - DNA, 25 bp, Probe Sequence
ttaacagggtcggtggtgagggctg

SEQ ID NO: 309700 - DNA, 25 bp, Probe Sequence
ttaacctgggctcgtggtagggctc

SEQ ID NO: 309701 - DNA, 25 bp, Probe Sequence
tttccctccactctacaaggagctc

SEQ ID NO: 309702 - DNA, 25 bp, Probe Sequence
tttgcccaaactcacccagtgagtg

SEQ ID NO: 309703 - DNA, 25 bp, Probe Sequence
ttttccaaaatgcacactgcgggtt

SEQ ID NO: 309704 - DNA, 25 bp, Probe Sequence
tttttcagcacttgggattggggtt

SEQ ID NO: 309705 - DNA, 25 bp, Probe Sequence
tttgcttcaatcaggtttggtggag

SEQ ID NO: 309706 - DNA, 25 bp, Probe Sequence
tttgctttatagtttggctggggag

SEQ ID NO: 309707 - DNA, 25 bp, Probe Sequence
tttgctttatagtttggctggggag

SEQ ID NO: 309708 - DNA, 25 bp, Probe Sequence
ttattttacagaaagggtagctaga

SEQ ID NO: 309709 - DNA, 25 bp, Probe Sequence
ttatttacacacatacgactggccc

SEQ ID NO: 309710 - DNA, 25 bp, Probe Sequence
ttatatctaactataacctccccca

SEQ ID NO: 309711 - DNA, 25 bp, Probe Sequence
tttaccaaaagtgtcaccccaccat

SEQ ID NO: 309712 - DNA, 25 bp, Probe Sequence
tttaaaaaatctgttgttccaaatg

SEQ ID NO: 309713 - DNA, 25 bp, Probe Sequence
tttgcaggaaagtcccttcttccaa

SEQ ID NO: 309714 - DNA, 25 bp, Probe Sequence
tttcagagaaagttagttcggctcg

SEQ ID NO: 309715 - DNA, 25 bp, Probe Sequence
tttgcagaaccaggttcttgcgcgt

SEQ ID NO: 309716 - DNA, 25 bp, Probe Sequence
tttgaaaagaccgtgctggcgcgtg

SEQ ID NO: 309717 - DNA, 25 bp, Probe Sequence
tttgaaaaaccgttgctggatctgc

SEQ ID NO: 309718 - DNA, 25 bp, Probe Sequence
tttgaaaaaacgactgcccatcccg

SEQ ID NO: 309719 - DNA, 25 bp, Probe Sequence
tttgacaagcacatctggctctcca

SEQ ID NO: 309720 - DNA, 25 bp, Probe Sequence
tttgaaacactcaagccatccacac

SEQ ID NO: 309721 - DNA, 25 bp, Probe Sequence
tttgaaacttgcaactttgagaaca

SEQ ID NO: 309722 - DNA, 25 bp, Probe Sequence
tttgctgaactgtccattttggtgg

SEQ ID NO: 309723 - DNA, 25 bp, Probe Sequence
tttgctgtacgcgttttttgagatg

SEQ ID NO: 309724 - DNA, 25 bp, Probe Sequence
tttgcactacctgttatcagtagtg

SEQ ID NO: 309725 - DNA, 25 bp, Probe Sequence
tttcaataccggagatcatgcaagc

SEQ ID NO: 309726 - DNA, 25 bp, Probe Sequence
tttccaacttggacgctgcagaatg

SEQ ID NO: 309727 - DNA, 25 bp, Probe Sequence
tttcctttctggaggcatcacatgc

SEQ ID NO: 309728 - DNA, 25 bp, Probe Sequence
tttcctgtgttgatggtgtagctcc

SEQ ID NO: 309729 - DNA, 25 bp, Probe Sequence
tttcatttattactgtttaggccga

SEQ ID NO: 309730 - DNA, 25 bp, Probe Sequence
tttcatcctgtctgtgttatgtggg

SEQ ID NO: 309731 - DNA, 25 bp, Probe Sequence
tttcatgcgttcccgtatatttgtc

SEQ ID NO: 309732 - DNA, 25 bp, Probe Sequence
tttcttttcagcctgttactgtcct

SEQ ID NO: 309733 - DNA, 25 bp, Probe Sequence
tttgcctgttagtgattgtttcaca

SEQ ID NO: 309734 - DNA, 25 bp, Probe Sequence
tttgcactgctcaattctgtttttc

SEQ ID NO: 309735 - DNA, 25 bp, Probe Sequence
tttgcacatgccatgttttcgtggc

SEQ ID NO: 309736 - DNA, 25 bp, Probe Sequence
tttgcactgctcagaatcttcaagg

SEQ ID NO: 309737 - DNA, 25 bp, Probe Sequence
tttgcctgtaagaatttgcacatga

SEQ ID NO: 309738 - DNA, 25 bp, Probe Sequence
tttgctcatgttattgttgacatga

SEQ ID NO: 309739 - DNA, 25 bp, Probe Sequence
tttgctgcgattgtttgtgaaactt

SEQ ID NO: 309740 - DNA, 25 bp, Probe Sequence
tttgcttttaattttgatacctctt

SEQ ID NO: 309741 - DNA, 25 bp, Probe Sequence
tttgcttggctatcttggacataca

SEQ ID NO: 309742 - DNA, 25 bp, Probe Sequence
tttctttgacatccttgtaaaatgt

SEQ ID NO: 309743 - DNA, 25 bp, Probe Sequence
tttgctctctgagccttgcaaaacc

SEQ ID NO: 309744 - DNA, 25 bp, Probe Sequence
tttctctgcttcactctggaggatc

SEQ ID NO: 309745 - DNA, 25 bp, Probe Sequence
tttgcctgccttagttgggagatct

SEQ ID NO: 309746 - DNA, 25 bp, Probe Sequence
tttccatgctgtttttgaggagctc

SEQ ID NO: 309747 - DNA, 25 bp, Probe Sequence
tttgcactctgttgcctgtgaggag

SEQ ID NO: 309748 - DNA, 25 bp, Probe Sequence
tttgcgctcggtgcgatactgatga

SEQ ID NO: 309749 - DNA, 25 bp, Probe Sequence
tttgcatccctgggccatacttgaa

SEQ ID NO: 309750 - DNA, 25 bp, Probe Sequence
tttcccaatctgccctacttgattg

SEQ ID NO: 309751 - DNA, 25 bp, Probe Sequence
tttcccaatctgccctacttgattg

SEQ ID NO: 309752 - DNA, 25 bp, Probe Sequence
tttcccagatcttcaataatttgtt

SEQ ID NO: 309753 - DNA, 25 bp, Probe Sequence
tttcccgaaacacacattggtacta

SEQ ID NO: 309754 - DNA, 25 bp, Probe Sequence
ttctcccaaaaaagcacctggtact

SEQ ID NO: 309755 - DNA, 25 bp, Probe Sequence
tttccaaactacagtcctatgtact

SEQ ID NO: 309756 - DNA, 25 bp, Probe Sequence
tttctcaaactaagtgcttgctgtt

SEQ ID NO: 309757 - DNA, 25 bp, Probe Sequence
tttgctgaaatcctgttttgtattt

SEQ ID NO: 309758 - DNA, 25 bp, Probe Sequence
tttcgaatatagctatcattgtgat

SEQ ID NO: 309759 - DNA, 25 bp, Probe Sequence
tttctcaagaatgcccatctgtgaa

SEQ ID NO: 309760 - DNA, 25 bp, Probe Sequence
tttgcatcattttgtcccttgtaaa

SEQ ID NO: 309761 - DNA, 25 bp, Probe Sequence
tttgcacttttgagactggtagcta

SEQ ID NO: 309762 - DNA, 25 bp, Probe Sequence
tttgccttattgctacttcaagctc

SEQ ID NO: 309763 - DNA, 25 bp, Probe Sequence
tttgcattctaaagttcttatactc

SEQ ID NO: 309764 - DNA, 25 bp, Probe Sequence
tttgcattataaactttttccattc

SEQ ID NO: 309765 - DNA, 25 bp, Probe Sequence
tttgctacaccaactatgttttcag

SEQ ID NO: 309766 - DNA, 25 bp, Probe Sequence
tttctgaacctgatagttttcacct

SEQ ID NO: 309767 - DNA, 25 bp, Probe Sequence
tttgccacacccaggtgatttcctc

SEQ ID NO: 309768 - DNA, 25 bp, Probe Sequence
tttccatcatggccatttgtatatt

SEQ ID NO: 309769 - DNA, 25 bp, Probe Sequence
tttgcacataatccatatttgctgt

SEQ ID NO: 309770 - DNA, 25 bp, Probe Sequence
tttgcaatttggaatttgtgtgagt

SEQ ID NO: 309771 - DNA, 25 bp, Probe Sequence
tttgccaatggtgctttggatactc

SEQ ID NO: 309772 - DNA, 25 bp, Probe Sequence
tttgccacattatctctgtttattc

SEQ ID NO: 309773 - DNA, 25 bp, Probe Sequence
tttcccaggagaccatttgtattac

SEQ ID NO: 309774 - DNA, 25 bp, Probe Sequence
tttcctggagtacatttgtcacatt

SEQ ID NO: 309775 - DNA, 25 bp, Probe Sequence
tttctccaatttcttagtcacttct

SEQ ID NO: 309776 - DNA, 25 bp, Probe Sequence
tttccaccatttcgtaatcaacttg

SEQ ID NO: 309777 - DNA, 25 bp, Probe Sequence
tttccagcccttggaaatcagaact

SEQ ID NO: 309778 - DNA, 25 bp, Probe Sequence
tttgccattgtttcgaaatagtgaa

SEQ ID NO: 309779 - DNA, 25 bp, Probe Sequence
tttcctgtgtgtaagcaataagtga

SEQ ID NO: 309780 - DNA, 25 bp, Probe Sequence
tttgcttttgccaagagtaagttat

SEQ ID NO: 309781 - DNA, 25 bp, Probe Sequence
tttgctttctcgtggataatattaa

SEQ ID NO: 309782 - DNA, 25 bp, Probe Sequence
tttgctttcttgtggacagcttgta

SEQ ID NO: 309783 - DNA, 25 bp, Probe Sequence
tttgcttctttataaactgtctgtt

SEQ ID NO: 309784 - DNA, 25 bp, Probe Sequence
tttgcttgtttatcagtcctgctct

SEQ ID NO: 309785 - DNA, 25 bp, Probe Sequence
tttgcattgaataaacttacagcca

SEQ ID NO: 309786 - DNA, 25 bp, Probe Sequence
tttgcattgaataaacttacagcca

SEQ ID NO: 309787 - DNA, 25 bp, Probe Sequence
tttgcctaaatctagctctaaaaga

SEQ ID NO: 309788 - DNA, 25 bp, Probe Sequence
tttccaacctgcttcttcaaacaga

SEQ ID NO: 309789 - DNA, 25 bp, Probe Sequence
tttcctatcctcaatcctgaacaag

SEQ ID NO: 309790 - DNA, 25 bp, Probe Sequence
tttccttcctctattgtctaatgtt

SEQ ID NO: 309791 - DNA, 25 bp, Probe Sequence
tttccattcccaatctagtgctaga

SEQ ID NO: 309792 - DNA, 25 bp, Probe Sequence
tttccattctgtggattagtgctag

SEQ ID NO: 309793 - DNA, 25 bp, Probe Sequence
tttgctctttgtggttggatctaac

SEQ ID NO: 309794 - DNA, 25 bp, Probe Sequence
tttgcattactctggtggattgttc

SEQ ID NO: 309795 - DNA, 25 bp, Probe Sequence
tttgctctatcttctggggtcagat

SEQ ID NO: 309796 - DNA, 25 bp, Probe Sequence
tttgctgtgattgcgcacgtgggaa

SEQ ID NO: 309797 - DNA, 25 bp, Probe Sequence
tttcttgaagtccacaggaagcaca

SEQ ID NO: 309798 - DNA, 25 bp, Probe Sequence
tttcctgaactccaaccagaatcca

SEQ ID NO: 309799 - DNA, 25 bp, Probe Sequence
tttctgctggaaacagactcgattc

SEQ ID NO: 309800 - DNA, 25 bp, Probe Sequence
tttgctgatggtcaacactctggcc

SEQ ID NO: 309801 - DNA, 25 bp, Probe Sequence
tttgctgtttgacatcctcatgttc

SEQ ID NO: 309802 - DNA, 25 bp, Probe Sequence
ttatctagtacccagtccatgttca

SEQ ID NO: 309803 - DNA, 25 bp, Probe Sequence
tttgccagtacatcaatggcgtgga

SEQ ID NO: 309804 - DNA, 25 bp, Probe Sequence
tttgccgtacatcaatgggcgtgga

SEQ ID NO: 309805 - DNA, 25 bp, Probe Sequence
tttgccagaacaccatggggcttgg

SEQ ID NO: 309806 - DNA, 25 bp, Probe Sequence
tttccagcaagaccaccgtgttggt

SEQ ID NO: 309807 - DNA, 25 bp, Probe Sequence
tttgctctgaaacacctgcctaatg

SEQ ID NO: 309808 - DNA, 25 bp, Probe Sequence
tttgcagatgaagcaacctgcacaa

SEQ ID NO: 309809 - DNA, 25 bp, Probe Sequence
tttccaaacaatacctatcataact

SEQ ID NO: 309810 - DNA, 25 bp, Probe Sequence
tttcctgaagcatttagttacaacc

SEQ ID NO: 309811 - DNA, 25 bp, Probe Sequence
tttcctattctgtggtttttccagc

SEQ ID NO: 309812 - DNA, 25 bp, Probe Sequence
tttgctttctcattagttttttcca

SEQ ID NO: 309813 - DNA, 25 bp, Probe Sequence
tttctctttagtcgttggtgttaga

SEQ ID NO: 309814 - DNA, 25 bp, Probe Sequence
tttcacttttgcagattgggtaaca

SEQ ID NO: 309815 - DNA, 25 bp, Probe Sequence
tttccttatggttttggatgtacca

SEQ ID NO: 309816 - DNA, 25 bp, Probe Sequence
tttcctctaggttttgcttgactca

SEQ ID NO: 309817 - DNA, 25 bp, Probe Sequence
tttccctaggatttgtcctacagct

SEQ ID NO: 309818 - DNA, 25 bp, Probe Sequence
tttctcctagaatgctgttgtaaat

SEQ ID NO: 309819 - DNA, 25 bp, Probe Sequence
ttatgccctcaaaagtgttttactt

SEQ ID NO: 309820 - DNA, 25 bp, Probe Sequence
tttcccttgacttcttgtttcaatt

SEQ ID NO: 309821 - DNA, 25 bp, Probe Sequence
tttcccttgacttcttgtttcaatt

SEQ ID NO: 309822 - DNA, 25 bp, Probe Sequence
tttccctgattctaattgcatttca

SEQ ID NO: 309823 - DNA, 25 bp, Probe Sequence
tttccctttcagttagtatacacta

SEQ ID NO: 309824 - DNA, 25 bp, Probe Sequence
tttccactcgtcaaaagcatatata

SEQ ID NO: 309825 - DNA, 25 bp, Probe Sequence
tttcctccggcggacagctgcttac

SEQ ID NO: 309826 - DNA, 25 bp, Probe Sequence
tttccttggtgcgacactgtgcatt

SEQ ID NO: 309827 - DNA, 25 bp, Probe Sequence
tttcctttgatgacatgtcctgcat

SEQ ID NO: 309828 - DNA, 25 bp, Probe Sequence
tttctcctatgtactgtgaacattt

SEQ ID NO: 309829 - DNA, 25 bp, Probe Sequence
tttgctttgttgatctgagccttct

SEQ ID NO: 309830 - DNA, 25 bp, Probe Sequence
tttgctttgcattttctgattttat

SEQ ID NO: 309831 - DNA, 25 bp, Probe Sequence
tttgctgttgattgctattttcaga

SEQ ID NO: 309832 - DNA, 25 bp, Probe Sequence
tttctattaatcttttgtcaacttc

SEQ ID NO: 309833 - DNA, 25 bp, Probe Sequence
tttcgattttgcttacagtagttcc

SEQ ID NO: 309834 - DNA, 25 bp, Probe Sequence
tttagattttttgaagaagcgcatc

SEQ ID NO: 309835 - DNA, 25 bp, Probe Sequence
tttaatttttaacaccatggcacct

SEQ ID NO: 309836 - DNA, 25 bp, Probe Sequence
tttaactggtgaaactagcctggaa

SEQ ID NO: 309837 - DNA, 25 bp, Probe Sequence
tttaactggtgaaactagcctggaa

SEQ ID NO: 309838 - DNA, 25 bp, Probe Sequence
tttataattggcacagtactttgaa

SEQ ID NO: 309839 - DNA, 25 bp, Probe Sequence
tttctaatcccagcattaaagtgaa

SEQ ID NO: 309840 - DNA, 25 bp, Probe Sequence
tttctcaatacgcctttaaaggaat

SEQ ID NO: 309841 - DNA, 25 bp, Probe Sequence
tttcatcaatcatgcctatttaatg

SEQ ID NO: 309842 - DNA, 25 bp, Probe Sequence
tttcatctgctatggccatggtttt

SEQ ID NO: 309843 - DNA, 25 bp, Probe Sequence
tttcagtgtcaaatggcggtcttat

SEQ ID NO: 309844 - DNA, 25 bp, Probe Sequence
tttcaggtgacaagtagggcatgta

SEQ ID NO: 309845 - DNA, 25 bp, Probe Sequence
tttccagtacatagctcaatgcctg

SEQ ID NO: 309846 - DNA, 25 bp, Probe Sequence
tttgctcctgacagtcatacctgaa

SEQ ID NO: 309847 - DNA, 25 bp, Probe Sequence
tttgctatttcttgtgtgacctgat

SEQ ID NO: 309848 - DNA, 25 bp, Probe Sequence
tttgcattaccttacatgactaatt

SEQ ID NO: 309849 - DNA, 25 bp, Probe Sequence
tttcctacctaaatattaaccatat

SEQ ID NO: 309850 - DNA, 25 bp, Probe Sequence
tttccagaactatatttgacccata

SEQ ID NO: 309851 - DNA, 25 bp, Probe Sequence
tttctctgaccttttgttactcaaa

SEQ ID NO: 309852 - DNA, 25 bp, Probe Sequence
tttctctatcgcattggtcaaccaa

SEQ ID NO: 309853 - DNA, 25 bp, Probe Sequence
tttgcctatctgatgtgattctaaa

SEQ ID NO: 309854 - DNA, 25 bp, Probe Sequence
tttccatattggcatgtagctacaa

SEQ ID NO: 309855 - DNA, 25 bp, Probe Sequence
tttccttcggtttgatgctgacaag

SEQ ID NO: 309856 - DNA, 25 bp, Probe Sequence
tttctcctccttcaagtacacagat

SEQ ID NO: 309857 - DNA, 25 bp, Probe Sequence
tttccccacattcacaaaatgaaaa

SEQ ID NO: 309858 - DNA, 25 bp, Probe Sequence
tttcctaacaactagcaaaagctat

SEQ ID NO: 309859 - DNA, 25 bp, Probe Sequence
tttcctccacaactcagaaaacagt

SEQ ID NO: 309860 - DNA, 25 bp, Probe Sequence
tttaatcaccactcaaaaatgtttt

SEQ ID NO: 309861 - DNA, 25 bp, Probe Sequence
tttaatcaccactcaaaaatgtttt

SEQ ID NO: 309862 - DNA, 25 bp, Probe Sequence
tttcaggcttactctaagaatttca

SEQ ID NO: 309863 - DNA, 25 bp, Probe Sequence
tttcaggctacctttgacaaagctt

SEQ ID NO: 309864 - DNA, 25 bp, Probe Sequence
tttcaagcttccttaatcacacctg

SEQ ID NO: 309865 - DNA, 25 bp, Probe Sequence
tttagcaataactcaaccacgctgc

SEQ ID NO: 309866 - DNA, 25 bp, Probe Sequence
tttcctgaagactatcttcccgtct

SEQ ID NO: 309867 - DNA, 25 bp, Probe Sequence
tttcactgaaaatttgtaccatttg

SEQ ID NO: 309868 - DNA, 25 bp, Probe Sequence
tttcctagctacatctggtaccttg

SEQ ID NO: 309869 - DNA, 25 bp, Probe Sequence
tttgcctcagctttatggttaccta

SEQ ID NO: 309870 - DNA, 25 bp, Probe Sequence
tttgcctacatataggaatcctctt

SEQ ID NO: 309871 - DNA, 25 bp, Probe Sequence
tttcagtagcatttagaccttctct

SEQ ID NO: 309872 - DNA, 25 bp, Probe Sequence
tttcgatgcctatgtgagcaccctc

SEQ ID NO: 309873 - DNA, 25 bp, Probe Sequence
tttcgagatcctcggagcagcgttc

SEQ ID NO: 309874 - DNA, 25 bp, Probe Sequence
tttcagagacatcctgctgcgagag

SEQ ID NO: 309875 - DNA, 25 bp, Probe Sequence
tttcactgtatccgccatgcatgga

SEQ ID NO: 309876 - DNA, 25 bp, Probe Sequence
tttactttcttggcactggaagggt

SEQ ID NO: 309877 - DNA, 25 bp, Probe Sequence
tttaatctttgtgacaggaaagccc

SEQ ID NO: 309878 - DNA, 25 bp, Probe Sequence
tttcaatctttagaggtctatagac

SEQ ID NO: 309879 - DNA, 25 bp, Probe Sequence
tttaacgatgttgcaggtattctca

SEQ ID NO: 309880 - DNA, 25 bp, Probe Sequence
tttacagtatttcctgggctacaac

SEQ ID NO: 309881 - DNA, 25 bp, Probe Sequence
tttaagtctattatgggcaaccaat

SEQ ID NO: 309882 - DNA, 25 bp, Probe Sequence
tttaatgttttgaggaccctccata

SEQ ID NO: 309883 - DNA, 25 bp, Probe Sequence
tttaatttatctctgtgacctgcca

SEQ ID NO: 309884 - DNA, 25 bp, Probe Sequence
tttaatgtttcatctgaatccagag

SEQ ID NO: 309885 - DNA, 25 bp, Probe Sequence
tttccaggatatgtctggtcaccag

SEQ ID NO: 309886 - DNA, 25 bp, Probe Sequence
tttccaggatcatactcagagacca

SEQ ID NO: 309887 - DNA, 25 bp, Probe Sequence
tttcaaccagcattcatgccgaacc

SEQ ID NO: 309888 - DNA, 25 bp, Probe Sequence
tttaatctccaaagccatatcctct

SEQ ID NO: 309889 - DNA, 25 bp, Probe Sequence
tttcaatccaggagccttgagtctg

SEQ ID NO: 309890 - DNA, 25 bp, Probe Sequence
tttctacctggaactccatagaatg

SEQ ID NO: 309891 - DNA, 25 bp, Probe Sequence
ttttgatcctaaccttgaagtatgc

SEQ ID NO: 309892 - DNA, 25 bp, Probe Sequence
tttatactctactctcagtatggat

SEQ ID NO: 309893 - DNA, 25 bp, Probe Sequence
tttgccacttaactccagtgtggat

SEQ ID NO: 309894 - DNA, 25 bp, Probe Sequence
tttgcctttaactagagtgtgtgat

SEQ ID NO: 309895 - DNA, 25 bp, Probe Sequence
tttgccttttgtttgattatgtgat

SEQ ID NO: 309896 - DNA, 25 bp, Probe Sequence
tttgcctttttgctgcagttggaga

SEQ ID NO: 309897 - DNA, 25 bp, Probe Sequence
tttccatttattcccttgttagcaa

SEQ ID NO: 309898 - DNA, 25 bp, Probe Sequence
tttgcctttttcactgtgtatggaa

SEQ ID NO: 309899 - DNA, 25 bp, Probe Sequence
tttccttcctttaatcttatgcaaa

SEQ ID NO: 309900 - DNA, 25 bp, Probe Sequence
tttgctcttcacataaagcttgcta

SEQ ID NO: 309901 - DNA, 25 bp, Probe Sequence
tttctttcctgtaggaattgtagtc

SEQ ID NO: 309902 - DNA, 25 bp, Probe Sequence
tttctgtttaataggtcttgtacct

SEQ ID NO: 309903 - DNA, 25 bp, Probe Sequence
tttctcttaaaacatagctttcctg

SEQ ID NO: 309904 - DNA, 25 bp, Probe Sequence
tttctgctctaattaaaatgtcact

SEQ ID NO: 309905 - DNA, 25 bp, Probe Sequence
tttccactcagattaatatgaagca

SEQ ID NO: 309906 - DNA, 25 bp, Probe Sequence
tttctcccagcttcaaatgcacaat

SEQ ID NO: 309907 - DNA, 25 bp, Probe Sequence
tttccatccacttgcacaatatcat

SEQ ID NO: 309908 - DNA, 25 bp, Probe Sequence
tttcgtctgcactaccaattcaatg

SEQ ID NO: 309909 - DNA, 25 bp, Probe Sequence
tttccttactagacctctctttagt

SEQ ID NO: 309910 - DNA, 25 bp, Probe Sequence
tttccccggagtacctattgtagat

SEQ ID NO: 309911 - DNA, 25 bp, Probe Sequence
tttccacctgggcgagtttgtcaat

SEQ ID NO: 309912 - DNA, 25 bp, Probe Sequence
tttccccctggcgggtgagagtgca

SEQ ID NO: 309913 - DNA, 25 bp, Probe Sequence
tttccccctggcgggtgagagtgca

SEQ ID NO: 309914 - DNA, 25 bp, Probe Sequence
tttccccactgcaggtgtgagatgt

SEQ ID NO: 309915 - DNA, 25 bp, Probe Sequence
tttcctcaccccaatggtagcatgt

SEQ ID NO: 309916 - DNA, 25 bp, Probe Sequence
tttccaactacggagtgtcactgct

SEQ ID NO: 309917 - DNA, 25 bp, Probe Sequence
tttacaagcacacggttctcagcca

SEQ ID NO: 309918 - DNA, 25 bp, Probe Sequence
tttaaagcaatgtttacccacagcg

SEQ ID NO: 309919 - DNA, 25 bp, Probe Sequence
tttagacaactggtaagccagctcc

SEQ ID NO: 309920 - DNA, 25 bp, Probe Sequence
tttcatataactgcccaggacgccc

SEQ ID NO: 309921 - DNA, 25 bp, Probe Sequence
tttataatcctggtgctcatgggca

SEQ ID NO: 309922 - DNA, 25 bp, Probe Sequence
ttatgaaatactcagcttaggcatt

SEQ ID NO: 309923 - DNA, 25 bp, Probe Sequence
ttaatcttactggactcaatgagca

SEQ ID NO: 309924 - DNA, 25 bp, Probe Sequence
ttaacttgggacctgaatgaaaggg

SEQ ID NO: 309925 - DNA, 25 bp, Probe Sequence
tttagcttagggcctggtggctagg

SEQ ID NO: 309926 - DNA, 25 bp, Probe Sequence
tttagtgccaggctgcggtgggcag

SEQ ID NO: 309927 - DNA, 25 bp, Probe Sequence
tttagtctgcagtctccgagacggg

SEQ ID NO: 309928 - DNA, 25 bp, Probe Sequence
tttatgccatcggcaccgtactgga

SEQ ID NO: 309929 - DNA, 25 bp, Probe Sequence
tttacactgctgcacctgaggtcga

SEQ ID NO: 309930 - DNA, 25 bp, Probe Sequence
tttcacacggcagtgtgctgggccc

SEQ ID NO: 309931 - DNA, 25 bp, Probe Sequence
tttcagctccagaatgttgcaagtc

SEQ ID NO: 309932 - DNA, 25 bp, Probe Sequence
tttactccgggattcaagtctccac

SEQ ID NO: 309933 - DNA, 25 bp, Probe Sequence
tttcactggcttctctatattccca

SEQ ID NO: 309934 - DNA, 25 bp, Probe Sequence
tttcacaggcttcaaattctcatgc

SEQ ID NO: 309935 - DNA, 25 bp, Probe Sequence
tttcctgcactaacattttgccgca

SEQ ID NO: 309936 - DNA, 25 bp, Probe Sequence
tttccttctgaagtgtttcacgaga

SEQ ID NO: 309937 - DNA, 25 bp, Probe Sequence
tttcctactgtgtcttgttacaagg

SEQ ID NO: 309938 - DNA, 25 bp, Probe Sequence
tttcctctgtagtttttagcactgg

SEQ ID NO: 309939 - DNA, 25 bp, Probe Sequence
tttcttttcgactttatactctgag

SEQ ID NO: 309940 - DNA, 25 bp, Probe Sequence
tttctgctcttccacaccagataat

SEQ ID NO: 309941 - DNA, 25 bp, Probe Sequence
tttcattatcatccattccaatttg

SEQ ID NO: 309942 - DNA, 25 bp, Probe Sequence
tttcctcatctgtcatgtcgatgat

SEQ ID NO: 309943 - DNA, 25 bp, Probe Sequence
tttcctcatctgagagcgaggcgtg

SEQ ID NO: 309944 - DNA, 25 bp, Probe Sequence
tttgcccttgcataggatgctagtg

SEQ ID NO: 309945 - DNA, 25 bp, Probe Sequence
tttcccctgcaatgcgtcttgtgaa

SEQ ID NO: 309946 - DNA, 25 bp, Probe Sequence
tttccaccccatcggttttgaagtg

SEQ ID NO: 309947 - DNA, 25 bp, Probe Sequence
ttttcccccaaggcttggctttgtg

SEQ ID NO: 309948 - DNA, 25 bp, Probe Sequence
ttttcccccatagaaatttgcagtt

SEQ ID NO: 309949 - DNA, 25 bp, Probe Sequence
ttttccccctgtgtaagttactatg

SEQ ID NO: 309950 - DNA, 25 bp, Probe Sequence
ttttcccccatcagtagatttttct

SEQ ID NO: 309951 - DNA, 25 bp, Probe Sequence
ttttcccgtgttctaatgtattttg

SEQ ID NO: 309952 - DNA, 25 bp, Probe Sequence
tttctccccttaccataatggatgc

SEQ ID NO: 309953 - DNA, 25 bp, Probe Sequence
tttcccttgttattaatagtatgtc

SEQ ID NO: 309954 - DNA, 25 bp, Probe Sequence
tttcacctcatttataatccagtag

SEQ ID NO: 309955 - DNA, 25 bp, Probe Sequence
tttctcctactctagcaaacatgta

SEQ ID NO: 309956 - DNA, 25 bp, Probe Sequence
tttcctctgcctgactagacaatga

SEQ ID NO: 309957 - DNA, 25 bp, Probe Sequence
tttccatctcgtgacttaaagttct

SEQ ID NO: 309958 - DNA, 25 bp, Probe Sequence
tttctccatggtgttttagagtttc

SEQ ID NO: 309959 - DNA, 25 bp, Probe Sequence
tttctccaggattttggtgagggtt

SEQ ID NO: 309960 - DNA, 25 bp, Probe Sequence
tttcttaatatgcttcttgaaggtt

SEQ ID NO: 309961 - DNA, 25 bp, Probe Sequence
tttcctgaattgctatgtgtctggg

SEQ ID NO: 309962 - DNA, 25 bp, Probe Sequence
tttcggatttgtcatttctgtggag

SEQ ID NO: 309963 - DNA, 25 bp, Probe Sequence
tttctggcttttccatgttgtttta

SEQ ID NO: 309964 - DNA, 25 bp, Probe Sequence
tttccatgcttgtgacagcattttt

SEQ ID NO: 309965 - DNA, 25 bp, Probe Sequence
tttccagcttataggcaactttata

SEQ ID NO: 309966 - DNA, 25 bp, Probe Sequence
tttcctcttatcaacaacttgtgac

SEQ ID NO: 309967 - DNA, 25 bp, Probe Sequence
tttcctgttatcactatctctgagt

SEQ ID NO: 309968 - DNA, 25 bp, Probe Sequence
tttcctacttgcggtacatctacgt

SEQ ID NO: 309969 - DNA, 25 bp, Probe Sequence
tttcctatcttggcagtacatctac

SEQ ID NO: 309970 - DNA, 25 bp, Probe Sequence
tttctaactcaggagtcagccaact

SEQ ID NO: 309971 - DNA, 25 bp, Probe Sequence
tttcaacacaggggacagctatgac

SEQ ID NO: 309972 - DNA, 25 bp, Probe Sequence
tttcccacactcatgacactgatga

SEQ ID NO: 309973 - DNA, 25 bp, Probe Sequence
tttgcctgaggctgtaactgagaga

SEQ ID NO: 309974 - DNA, 25 bp, Probe Sequence
tttgccaacatcttgggactggaga

SEQ ID NO: 309975 - DNA, 25 bp, Probe Sequence
tttccatcctttagcaggctgggcc

SEQ ID NO: 309976 - DNA, 25 bp, Probe Sequence
tttcgatcctcgtcaggtgcaggtc

SEQ ID NO: 309977 - DNA, 25 bp, Probe Sequence
tttcgatcctcgtcaggtgcaggtc

SEQ ID NO: 309978 - DNA, 25 bp, Probe Sequence
tttctgaccacgactttgcaggatc

SEQ ID NO: 309979 - DNA, 25 bp, Probe Sequence
tttcatacgcacctttgagggtttt

SEQ ID NO: 309980 - DNA, 25 bp, Probe Sequence
tttcacccactctttgagtactttg

SEQ ID NO: 309981 - DNA, 25 bp, Probe Sequence
tttactcgacattttagatactatg

SEQ ID NO: 309982 - DNA, 25 bp, Probe Sequence
tttccggacttttaaatgctaactg

SEQ ID NO: 309983 - DNA, 25 bp, Probe Sequence
ttttaacacgtttactactatagct

SEQ ID NO: 309984 - DNA, 25 bp, Probe Sequence
ttatataaccaataatctaccatag

SEQ ID NO: 309985 - DNA, 25 bp, Probe Sequence
ttataaatccagtaaactaccaaca

SEQ ID NO: 309986 - DNA, 25 bp, Probe Sequence
tttaaacctgtattaataggcaaat

SEQ ID NO: 309987 - DNA, 25 bp, Probe Sequence
tttaaaccattgttgttgagtgtaa

SEQ ID NO: 309988 - DNA, 25 bp, Probe Sequence
tttcaagaccatttggtgcaggtta

SEQ ID NO: 309989 - DNA, 25 bp, Probe Sequence
tttcttactcttcgcagtcaggtaa

SEQ ID NO: 309990 - DNA, 25 bp, Probe Sequence
tttcttactcgggagctggctgaag

SEQ ID NO: 309991 - DNA, 25 bp, Probe Sequence
tttctacctgggccagtggcgggaa

SEQ ID NO: 309992 - DNA, 25 bp, Probe Sequence
tttcttctggggccaattccttaag

SEQ ID NO: 309993 - DNA, 25 bp, Probe Sequence
tttccctgctattggcatattccat

SEQ ID NO: 309994 - DNA, 25 bp, Probe Sequence
tttcccacaaagtcacttcctacaa

SEQ ID NO: 309995 - DNA, 25 bp, Probe Sequence
tttcccattaactctttctgaccaa

SEQ ID NO: 309996 - DNA, 25 bp, Probe Sequence
tttccctggaactctttatctcaat

SEQ ID NO: 309997 - DNA, 25 bp, Probe Sequence
tttctgtttgaacccttcatttaat

SEQ ID NO: 309998 - DNA, 25 bp, Probe Sequence
tttctgtgttgaagcactgttggtt

SEQ ID NO: 309999 - DNA, 25 bp, Probe Sequence
tttctctgttgtagacatcttgtga

SEQ ID NO: 310000 - DNA, 25 bp, Probe Sequence
tttcctgtttgtgatctattatgcc

SEQ ID NO: 310001 - DNA, 25 bp, Probe Sequence
tttccagttttgcatccagtgacgt

SEQ ID NO: 310002 - DNA, 25 bp, Probe Sequence
tttccagaattccgtatcagtcacc

SEQ ID NO: 310003 - DNA, 25 bp, Probe Sequence
tttctagacttgtgctgatcgtgct

SEQ ID NO: 310004 - DNA, 25 bp, Probe Sequence
tttcaaggccaccacatgtctgtgc

SEQ ID NO: 310005 - DNA, 25 bp, Probe Sequence
tttcaaggccaccacatgtctgtgc

SEQ ID NO: 310006 - DNA, 25 bp, Probe Sequence
tttcaaggccaccacatgtctgtgc

SEQ ID NO: 310007 - DNA, 25 bp, Probe Sequence
tttcaatagccactaaccttgcctg

SEQ ID NO: 310008 - DNA, 25 bp, Probe Sequence
tttcaatacatccacaagttttcga

SEQ ID NO: 310009 - DNA, 25 bp, Probe Sequence
tttcccagagcaaccatgttttagc

SEQ ID NO: 310010 - DNA, 25 bp, Probe Sequence
tttctccggacagcagtaggccagc

SEQ ID NO: 310011 - DNA, 25 bp, Probe Sequence
tttctccaggattgtcagtggcttc

SEQ ID NO: 310012 - DNA, 25 bp, Probe Sequence
tttcatccgatgtttactgagctcc

SEQ ID NO: 310013 - DNA, 25 bp, Probe Sequence
tttcctcagaggaagcctgagtgct

SEQ ID NO: 310014 - DNA, 25 bp, Probe Sequence
tttgccacagactaatggctatgac

SEQ ID NO: 310015 - DNA, 25 bp, Probe Sequence
tttcacactgccttcaggccagaag

SEQ ID NO: 310016 - DNA, 25 bp, Probe Sequence
tttccattccctggcagtgaggagc

SEQ ID NO: 310017 - DNA, 25 bp, Probe Sequence
tttccttcaacttgtggatgcaggc

SEQ ID NO: 310018 - DNA, 25 bp, Probe Sequence
ttttggtcgtctttctgacaggcct

SEQ ID NO: 310019 - DNA, 25 bp, Probe Sequence
tttctgggagctatcttgtctacct

SEQ ID NO: 310020 - DNA, 25 bp, Probe Sequence
tttctgggagctatcttgtctacct

SEQ ID NO: 310021 - DNA, 25 bp, Probe Sequence
tttctcatggagtttcttatctttt

SEQ ID NO: 310022 - DNA, 25 bp, Probe Sequence
tttcattaagatctctaatctgttt

SEQ ID NO: 310023 - DNA, 25 bp, Probe Sequence
tttcctaagtgccaacaattttcta

SEQ ID NO: 310024 - DNA, 25 bp, Probe Sequence
tttgccaatattgccaagtttttat

SEQ ID NO: 310025 - DNA, 25 bp, Probe Sequence
tttgccaaattaaagccttatttat

SEQ ID NO: 310026 - DNA, 25 bp, Probe Sequence
tttccaacatgtagaactgcttttt

SEQ ID NO: 310027 - DNA, 25 bp, Probe Sequence
tttccaacataatggattaatgttc

SEQ ID NO: 310028 - DNA, 25 bp, Probe Sequence
tttcacaactgagaggatttttccc

SEQ ID NO: 310029 - DNA, 25 bp, Probe Sequence
tttcaacactgggagaatattttct

SEQ ID NO: 310030 - DNA, 25 bp, Probe Sequence
tttaaggctgtgtgaatttttctaa

SEQ ID NO: 310031 - DNA, 25 bp, Probe Sequence
tttcttggcctaggaatccttttag

SEQ ID NO: 310032 - DNA, 25 bp, Probe Sequence
tttttgcagcgatagtatactttat

SEQ ID NO: 310033 - DNA, 25 bp, Probe Sequence
tttcctgcagtttagttaatatgtg

SEQ ID NO: 310034 - DNA, 25 bp, Probe Sequence
tttcccaatgtcaagttattagggt

SEQ ID NO: 310035 - DNA, 25 bp, Probe Sequence
tttccctatgtctgttcttacgtat

SEQ ID NO: 310036 - DNA, 25 bp, Probe Sequence
tttctcctttgaagttttacagctt

SEQ ID NO: 310037 - DNA, 25 bp, Probe Sequence
tttattctttggttttgaacattgt

SEQ ID NO: 310038 - DNA, 25 bp, Probe Sequence
tttacccttgactttgctgaaattt

SEQ ID NO: 310039 - DNA, 25 bp, Probe Sequence
tttcaggtcattcccaagtaaattt

SEQ ID NO: 310040 - DNA, 25 bp, Probe Sequence
tttagagcctttcacctaatcatgt

SEQ ID NO: 310041 - DNA, 25 bp, Probe Sequence
ttgttgacccggtacttcatactgc

SEQ ID NO: 310042 - DNA, 25 bp, Probe Sequence
ttggagaacccgtactctagggcca

SEQ ID NO: 310043 - DNA, 25 bp, Probe Sequence
ttctagaacctgcattcccagggcc

SEQ ID NO: 310044 - DNA, 25 bp, Probe Sequence
tttcgttctctgattccagcagagg

SEQ ID NO: 310045 - DNA, 25 bp, Probe Sequence
tttctgtttcagatcactgcggtgg

SEQ ID NO: 310046 - DNA, 25 bp, Probe Sequence
tttctattccacaaagctgccattg

SEQ ID NO: 310047 - DNA, 25 bp, Probe Sequence
tttctgtgaacagagaggccatggg

SEQ ID NO: 310048 - DNA, 25 bp, Probe Sequence
tttagtggacacggaggctcttagc

SEQ ID NO: 310049 - DNA, 25 bp, Probe Sequence
ttttatggctgcctggctggcatct

SEQ ID NO: 310050 - DNA, 25 bp, Probe Sequence
tttcagcatgtggctcgcgtggaca

SEQ ID NO: 310051 - DNA, 25 bp, Probe Sequence
tttcgactggtccagctctgacatc

SEQ ID NO: 310052 - DNA, 25 bp, Probe Sequence
tttccattggacctgccaatcacac

SEQ ID NO: 310053 - DNA, 25 bp, Probe Sequence
ttgttgcttaatgcccaaccaccat

SEQ ID NO: 310054 - DNA, 25 bp, Probe Sequence
ttttctgctggagcaaaacccccca

SEQ ID NO: 310055 - DNA, 25 bp, Probe Sequence
ttgtctacaggtgaataaaggctcc

SEQ ID NO: 310056 - DNA, 25 bp, Probe Sequence
tttcctcagtgatcttaaaagctcc

SEQ ID NO: 310057 - DNA, 25 bp, Probe Sequence
tttcaggcctgctctacaaaagtac

SEQ ID NO: 310058 - DNA, 25 bp, Probe Sequence
tttcctgcattctgtacataaagtt

SEQ ID NO: 310059 - DNA, 25 bp, Probe Sequence
tttcgctgccactgttcatattcag

SEQ ID NO: 310060 - DNA, 25 bp, Probe Sequence
tttccccacggttatatgtgtgtcc

SEQ ID NO: 310061 - DNA, 25 bp, Probe Sequence
tttccatcccatgttggtttgtccc

SEQ ID NO: 310062 - DNA, 25 bp, Probe Sequence
tttaatccatcacatttttcttccc

SEQ ID NO: 310063 - DNA, 25 bp, Probe Sequence
tttaatccatcacatttttcttccc

SEQ ID NO: 310064 - DNA, 25 bp, Probe Sequence
tttaatcgatgctgtttcattcctt

SEQ ID NO: 310065 - DNA, 25 bp, Probe Sequence
tttaacctgcaagttctcagtttct

SEQ ID NO: 310066 - DNA, 25 bp, Probe Sequence
ttttgaccacgagccatgagttttc

SEQ ID NO: 310067 - DNA, 25 bp, Probe Sequence
ttttgaccacgagccatgagttttc

SEQ ID NO: 310068 - DNA, 25 bp, Probe Sequence
ttttaccctactgatgatgtgttgt

SEQ ID NO: 310069 - DNA, 25 bp, Probe Sequence
tttctacctgcttgtcttattttta

SEQ ID NO: 310070 - DNA, 25 bp, Probe Sequence
tttctaccctcagtttctaaatgta

SEQ ID NO: 310071 - DNA, 25 bp, Probe Sequence
tttctacctgccgtgtatcagcgaa

SEQ ID NO: 310072 - DNA, 25 bp, Probe Sequence
tttcatacattggcctcatgaccca

SEQ ID NO: 310073 - DNA, 25 bp, Probe Sequence
tttcacacaatacttcagacacaca

SEQ ID NO: 310074 - DNA, 25 bp, Probe Sequence
tttccctcattgtagcgaagagcag

SEQ ID NO: 310075 - DNA, 25 bp, Probe Sequence
tttccatccaaggccaaagagcagc

SEQ ID NO: 310076 - DNA, 25 bp, Probe Sequence
tttcacgcctcaggcaattagacac

SEQ ID NO: 310077 - DNA, 25 bp, Probe Sequence
tttaagagctcccattgtacagcat

SEQ ID NO: 310078 - DNA, 25 bp, Probe Sequence
tttaatgcagcttgcaaaattcaga

SEQ ID NO: 310079 - DNA, 25 bp, Probe Sequence
tttaatgtgcactcaacatgtaata

SEQ ID NO: 310080 - DNA, 25 bp, Probe Sequence
tttaatctgaaatccatgtagcaac

SEQ ID NO: 310081 - DNA, 25 bp, Probe Sequence
ttatgaatcgtaggactgctgtgaa

SEQ ID NO: 310082 - DNA, 25 bp, Probe Sequence
tttcaagcagtcgtgcctgtgtcca

SEQ ID NO: 310083 - DNA, 25 bp, Probe Sequence
tttcacagagcattcaccgctgacc

SEQ ID NO: 310084 - DNA, 25 bp, Probe Sequence
tttaatgatgatgactccgcaagcc

SEQ ID NO: 310085 - DNA, 25 bp, Probe Sequence
tttaataacaacttccggcagcaga

SEQ ID NO: 310086 - DNA, 25 bp, Probe Sequence
tttccatcaatttttcctgaccgag

SEQ ID NO: 310087 - DNA, 25 bp, Probe Sequence
tttaatcaatgtgttctcttcggtg

SEQ ID NO: 310088 - DNA, 25 bp, Probe Sequence
tttaaaagtagcatcttgccgggtt

SEQ ID NO: 310089 - DNA, 25 bp, Probe Sequence
tttcatgtaagtattcattccagag

SEQ ID NO: 310090 - DNA, 25 bp, Probe Sequence
tttcttaaggctaatattccattgt

SEQ ID NO: 310091 - DNA, 25 bp, Probe Sequence
tttcttgagagcctgtagatttctt

SEQ ID NO: 310092 - DNA, 25 bp, Probe Sequence
tttctggaatgccttttctctgttc

SEQ ID NO: 310093 - DNA, 25 bp, Probe Sequence
tttcaggcagatggttgtcatccat

SEQ ID NO: 310094 - DNA, 25 bp, Probe Sequence
tttctgagtcattgagtgtcaccag

SEQ ID NO: 310095 - DNA, 25 bp, Probe Sequence
tttcatgagccttacagacacacag

SEQ ID NO: 310096 - DNA, 25 bp, Probe Sequence
tttctgcacctgtagagatcaccaa

SEQ ID NO: 310097 - DNA, 25 bp, Probe Sequence
tttctcacacttgttgcaccaaagt

SEQ ID NO: 310098 - DNA, 25 bp, Probe Sequence
tttctgcacagcttttccaaaataa

SEQ ID NO: 310099 - DNA, 25 bp, Probe Sequence
tttcagatgcagttttcaaattata

SEQ ID NO: 310100 - DNA, 25 bp, Probe Sequence
tttacacagacatcatctacatctt

SEQ ID NO: 310101 - DNA, 25 bp, Probe Sequence
tttcacaagcactgttgactctgca

SEQ ID NO: 310102 - DNA, 25 bp, Probe Sequence
tttccatagcctctgagactcataa

SEQ ID NO: 310103 - DNA, 25 bp, Probe Sequence
tttctgcaaagcctggaaccaaata

SEQ ID NO: 310104 - DNA, 25 bp, Probe Sequence
tttctcaacatgcctggagatgccc

SEQ ID NO: 310105 - DNA, 25 bp, Probe Sequence
tttacaagcagcgggcgcagcccgt

SEQ ID NO: 310106 - DNA, 25 bp, Probe Sequence
tttactgtgagggcgagctgcacgg

SEQ ID NO: 310107 - DNA, 25 bp, Probe Sequence
tttacctggcaggcagtctgctctc

SEQ ID NO: 310108 - DNA, 25 bp, Probe Sequence
tttacctgcagctcagatagcctcg

SEQ ID NO: 310109 - DNA, 25 bp, Probe Sequence
ttatgatctgggatcagaagtctct

SEQ ID NO: 310110 - DNA, 25 bp, Probe Sequence
ttatatagaggagacaagtcgtaac

SEQ ID NO: 310111 - DNA, 25 bp, Probe Sequence
tttatggacgaggagccccctacaa

SEQ ID NO: 310112 - DNA, 25 bp, Probe Sequence
tttatccagagagaccacaccaaaa

SEQ ID NO: 310113 - DNA, 25 bp, Probe Sequence
tttcagccatgctgatgaccacacc

SEQ ID NO: 310114 - DNA, 25 bp, Probe Sequence
tttacacatgcaggaatctccacac

SEQ ID NO: 310115 - DNA, 25 bp, Probe Sequence
tttcccatgacgcatggcaacaccg

SEQ ID NO: 310116 - DNA, 25 bp, Probe Sequence
tttcccatgcacctaatgctgtgaa

SEQ ID NO: 310117 - DNA, 25 bp, Probe Sequence
tttctcactgcatataagagttatg

SEQ ID NO: 310118 - DNA, 25 bp, Probe Sequence
tttctgacatgtgcctatgcgtttg

SEQ ID NO: 310119 - DNA, 25 bp, Probe Sequence
ttttaaggaccacgtgtctctgggg

SEQ ID NO: 310120 - DNA, 25 bp, Probe Sequence
tttaaagcaacaggcctttctcagg

SEQ ID NO: 310121 - DNA, 25 bp, Probe Sequence
ttataccataaaggccagacttagg

SEQ ID NO: 310122 - DNA, 25 bp, Probe Sequence
tttagactaatatacaacttcacct

SEQ ID NO: 310123 - DNA, 25 bp, Probe Sequence
ttgtaaacgttagcagactttcctg

SEQ ID NO: 310124 - DNA, 25 bp, Probe Sequence
ttatgctaacggatcctacgttcct

SEQ ID NO: 310125 - DNA, 25 bp, Probe Sequence
ttgactaggacgattctcacccttt

SEQ ID NO: 310126 - DNA, 25 bp, Probe Sequence
ttaaatggaactatctccaaatttt

SEQ ID NO: 310127 - DNA, 25 bp, Probe Sequence
ttaggaaaacatctcctgggttttg

SEQ ID NO: 310128 - DNA, 25 bp, Probe Sequence
ttaggtcaggaaatacgtggtaatt

SEQ ID NO: 310129 - DNA, 25 bp, Probe Sequence
ttctggtaataagatcacgtttgtt

SEQ ID NO: 310130 - DNA, 25 bp, Probe Sequence
ttcggctaagtaggccacaccttga

SEQ ID NO: 310131 - DNA, 25 bp, Probe Sequence
tttagcattgtgaagcgctgcaccc

SEQ ID NO: 310132 - DNA, 25 bp, Probe Sequence
tttcaatgttcaagcatcccgctca

SEQ ID NO: 310133 - DNA, 25 bp, Probe Sequence
tttctatttcatacattctcataca

SEQ ID NO: 310134 - DNA, 25 bp, Probe Sequence
tttcttttattctttgcacaacaac

SEQ ID NO: 310135 - DNA, 25 bp, Probe Sequence
tttccctttttgtgcacacctatat

SEQ ID NO: 310136 - DNA, 25 bp, Probe Sequence
tttcccttttcctacagacgtatat

SEQ ID NO: 310137 - DNA, 25 bp, Probe Sequence
tttcctcttgtctactccagacagt

SEQ ID NO: 310138 - DNA, 25 bp, Probe Sequence
tttctttggctttacgagccgatta

SEQ ID NO: 310139 - DNA, 25 bp, Probe Sequence
tttcctttgttctaagactccattt

SEQ ID NO: 310140 - DNA, 25 bp, Probe Sequence
tttcctgttttgtattatctgcttt

SEQ ID NO: 310141 - DNA, 25 bp, Probe Sequence
tttctggttttggtatatatccatt

SEQ ID NO: 310142 - DNA, 25 bp, Probe Sequence
tttctgtcactattttatgtccctt

SEQ ID NO: 310143 - DNA, 25 bp, Probe Sequence
tttatgtagtagacagttgtgaccg

SEQ ID NO: 310144 - DNA, 25 bp, Probe Sequence
ttttaaaagccagctgtgaccattg

SEQ ID NO: 310145 - DNA, 25 bp, Probe Sequence
tttaatattagccccggatctcctt

SEQ ID NO: 310146 - DNA, 25 bp, Probe Sequence
tttaaatgtgatacccatagcttcc

SEQ ID NO: 310147 - DNA, 25 bp, Probe Sequence
tttagtattataacagcatcacttt

SEQ ID NO: 310148 - DNA, 25 bp, Probe Sequence
tttaatcataatcaacatcagtttt

SEQ ID NO: 310149 - DNA, 25 bp, Probe Sequence
tttcaactagatcaagacatgttaa

SEQ ID NO: 310150 - DNA, 25 bp, Probe Sequence
ttataactggaaataggtggtaaga

SEQ ID NO: 310151 - DNA, 25 bp, Probe Sequence
tttcagcacttgggattggggttaa

SEQ ID NO: 310152 - DNA, 25 bp, Probe Sequence
tttagcagctactgtttgtgttaaa

SEQ ID NO: 310153 - DNA, 25 bp, Probe Sequence
tttaactacacatgcttggaattaa

SEQ ID NO: 310154 - DNA, 25 bp, Probe Sequence
tttaacatacattcgtgtggaccaa

SEQ ID NO: 310155 - DNA, 25 bp, Probe Sequence
tttacaacatcatcggtggacttga

SEQ ID NO: 310156 - DNA, 25 bp, Probe Sequence
tttaaaatgtgtacgtgggccagca

SEQ ID NO: 310157 - DNA, 25 bp, Probe Sequence
ttatagaaggtctcaagtggctagc

SEQ ID NO: 310158 - DNA, 25 bp, Probe Sequence
tttcaaattgtatctagtgcagctg

SEQ ID NO: 310159 - DNA, 25 bp, Probe Sequence
tttaaagtgaactacagctgtgctg

SEQ ID NO: 310160 - DNA, 25 bp, Probe Sequence
tttatactgttattactgcatttat

SEQ ID NO: 310161 - DNA, 25 bp, Probe Sequence
tttactctgcatagccaaccttata

SEQ ID NO: 310162 - DNA, 25 bp, Probe Sequence
tttcatgctcttagtcaaattctgt

SEQ ID NO: 310163 - DNA, 25 bp, Probe Sequence
tttaatccattgtcagtatttgtgc

SEQ ID NO: 310164 - DNA, 25 bp, Probe Sequence
tttacatactcattagtaagtggga

SEQ ID NO: 310165 - DNA, 25 bp, Probe Sequence
tttagtcctcagaaatggactagga

SEQ ID NO: 310166 - DNA, 25 bp, Probe Sequence
tttagatccatccaatatgcgaaaa

SEQ ID NO: 310167 - DNA, 25 bp, Probe Sequence
tttcagatacaccacatacatattg

SEQ ID NO: 310168 - DNA, 25 bp, Probe Sequence
tttcctcacaagtcatcatgatttt

SEQ ID NO: 310169 - DNA, 25 bp, Probe Sequence
tttctcccagaggcagtgactttat

SEQ ID NO: 310170 - DNA, 25 bp, Probe Sequence
tttcccctcatagatagcttctgat

SEQ ID NO: 310171 - DNA, 25 bp, Probe Sequence
tttcccgtcttgactgagttcagtc

SEQ ID NO: 310172 - DNA, 25 bp, Probe Sequence
tttccctgacttaaacctcactgag

SEQ ID NO: 310173 - DNA, 25 bp, Probe Sequence
tttccctgacttaaacctcactgag

SEQ ID NO: 310174 - DNA, 25 bp, Probe Sequence
tttcctcttattcaagccatgcacc

SEQ ID NO: 310175 - DNA, 25 bp, Probe Sequence
tttcactctcttagcaaggtctcac

SEQ ID NO: 310176 - DNA, 25 bp, Probe Sequence
tttctcattattataggctccctcc

SEQ ID NO: 310177 - DNA, 25 bp, Probe Sequence
tttctcattattataggctccctcc

SEQ ID NO: 310178 - DNA, 25 bp, Probe Sequence
tttctattacttgtgcatttgcctc

SEQ ID NO: 310179 - DNA, 25 bp, Probe Sequence
tttctttcctctgttatagcattca

SEQ ID NO: 310180 - DNA, 25 bp, Probe Sequence
tttctttgacctgttaggaatataa

SEQ ID NO: 310181 - DNA, 25 bp, Probe Sequence
tttatcttatccttttaccaaatca

SEQ ID NO: 310182 - DNA, 25 bp, Probe Sequence
tttctttatgtctgtttgtgcaaac

SEQ ID NO: 310183 - DNA, 25 bp, Probe Sequence
tttttatgtacttttctggaactag

SEQ ID NO: 310184 - DNA, 25 bp, Probe Sequence
tttttatgtacttttctggaactag

SEQ ID NO: 310185 - DNA, 25 bp, Probe Sequence
tttctttttcttttttgagacagag

SEQ ID NO: 310186 - DNA, 25 bp, Probe Sequence
tttctctttgtaattatttctttag

SEQ ID NO: 310187 - DNA, 25 bp, Probe Sequence
tttctctttgtaattatttctttag

SEQ ID NO: 310188 - DNA, 25 bp, Probe Sequence
tttctcctcattcatttcttttata

SEQ ID NO: 310189 - DNA, 25 bp, Probe Sequence
tttctcagccaaatactcatctttt

SEQ ID NO: 310190 - DNA, 25 bp, Probe Sequence
tttctcagccaaatactcatctttt

SEQ ID NO: 310191 - DNA, 25 bp, Probe Sequence
tttctcagccaaatactcatctttt

SEQ ID NO: 310192 - DNA, 25 bp, Probe Sequence
tttctgagacagctttcagcacttc

SEQ ID NO: 310193 - DNA, 25 bp, Probe Sequence
tttctgaatcataattaaactttat

SEQ ID NO: 310194 - DNA, 25 bp, Probe Sequence
tttctgattttatacccactgtgtg

SEQ ID NO: 310195 - DNA, 25 bp, Probe Sequence
tttctattgttatttccaaattgat

SEQ ID NO: 310196 - DNA, 25 bp, Probe Sequence
tttctatgtggaatttcctatcttg

SEQ ID NO: 310197 - DNA, 25 bp, Probe Sequence
tttctcttccacaactcgtgtttaa

SEQ ID NO: 310198 - DNA, 25 bp, Probe Sequence
ttatgatttcctcacaggttttaca

SEQ ID NO: 310199 - DNA, 25 bp, Probe Sequence
tttcattcagttcaaagtatttcca

SEQ ID NO: 310200 - DNA, 25 bp, Probe Sequence
tttatctgagtctgttggtacccca

SEQ ID NO: 310201 - DNA, 25 bp, Probe Sequence
tttactgagaaactttggcccctct

SEQ ID NO: 310202 - DNA, 25 bp, Probe Sequence
tttagaaaaaatttggccatctctt

SEQ ID NO: 310203 - DNA, 25 bp, Probe Sequence
tttacggtaaactgcccacttggca

SEQ ID NO: 310204 - DNA, 25 bp, Probe Sequence
tttacggtaaactgcccacttggca

SEQ ID NO: 310205 - DNA, 25 bp, Probe Sequence
tttacaggtaggaccaccacacttg

SEQ ID NO: 310206 - DNA, 25 bp, Probe Sequence
tttatgagggagaccccgacagagg

SEQ ID NO: 310207 - DNA, 25 bp, Probe Sequence
tttaggggttccctctaaggcatcg

SEQ ID NO: 310208 - DNA, 25 bp, Probe Sequence
tttcacctggtttgtcctaaggcca

SEQ ID NO: 310209 - DNA, 25 bp, Probe Sequence
tttacgatgttttcctcaaaggcct

SEQ ID NO: 310210 - DNA, 25 bp, Probe Sequence
tttcatccattattagcctggggtg

SEQ ID NO: 310211 - DNA, 25 bp, Probe Sequence
tttcccatggaaatgccaccgtgtc

SEQ ID NO: 310212 - DNA, 25 bp, Probe Sequence
tttcagacatggtagattcctttgt

SEQ ID NO: 310213 - DNA, 25 bp, Probe Sequence
tttaactgacgacgaccttcttcgc

SEQ ID NO: 310214 - DNA, 25 bp, Probe Sequence
tttaaagcactacatctgttttcac

SEQ ID NO: 310215 - DNA, 25 bp, Probe Sequence
ttcaaaggcaaagattgttagatca

SEQ ID NO: 310216 - DNA, 25 bp, Probe Sequence
tttaagggccattcattttagatga

SEQ ID NO: 310217 - DNA, 25 bp, Probe Sequence
tttcaaaggcaaagattgttagatc

SEQ ID NO: 310218 - DNA, 25 bp, Probe Sequence
tttatgacagggtgttgcagtaaca

SEQ ID NO: 310219 - DNA, 25 bp, Probe Sequence
ttttatgacagggtgttgcagtaac

SEQ ID NO: 310220 - DNA, 25 bp, Probe Sequence
tttctcattgcataatgtcacagtt

SEQ ID NO: 310221 - DNA, 25 bp, Probe Sequence
tttctagtgctatattcatcctgta

SEQ ID NO: 310222 - DNA, 25 bp, Probe Sequence
tttctcattgtatgtctatgctttg

SEQ ID NO: 310223 - DNA, 25 bp, Probe Sequence
tttctcttgccatttgtagctttgc

SEQ ID NO: 310224 - DNA, 25 bp, Probe Sequence
tttctcggagcaaagtgacttgagc

SEQ ID NO: 310225 - DNA, 25 bp, Probe Sequence
tttctagccactgtggacttgagca

SEQ ID NO: 310226 - DNA, 25 bp, Probe Sequence
tttcttgccttgatgtactggagca

SEQ ID NO: 310227 - DNA, 25 bp, Probe Sequence
ttttctgcctttgtagggacagcaa

SEQ ID NO: 310228 - DNA, 25 bp, Probe Sequence
tttctctttttcaagcaagtgaaaa

SEQ ID NO: 310229 - DNA, 25 bp, Probe Sequence
tttactatttctcaaagtgctaata

SEQ ID NO: 310230 - DNA, 25 bp, Probe Sequence
tttacttggccttaaatcctcagtg

SEQ ID NO: 310231 - DNA, 25 bp, Probe Sequence
tttactttctggtaatgtcttcagt

SEQ ID NO: 310232 - DNA, 25 bp, Probe Sequence
tttactttcaagaatatactctggt

SEQ ID NO: 310233 - DNA, 25 bp, Probe Sequence
tttctctgttttaaatactctggtg

SEQ ID NO: 310234 - DNA, 25 bp, Probe Sequence
tttctgttttcagtaaagtctcgtt

SEQ ID NO: 310235 - DNA, 25 bp, Probe Sequence
tttctgttttcagtaaagtctcgtt

SEQ ID NO: 310236 - DNA, 25 bp, Probe Sequence
tttctggttttttatattgaggtat

SEQ ID NO: 310237 - DNA, 25 bp, Probe Sequence
tttctttgtcttttatattgtttgc

SEQ ID NO: 310238 - DNA, 25 bp, Probe Sequence
tttctgtatgtctccatctattgat

SEQ ID NO: 310239 - DNA, 25 bp, Probe Sequence
ttgtctaggctcacgatctttgggc

SEQ ID NO: 310240 - DNA, 25 bp, Probe Sequence
tttctttgacttcaatgtattgagc

SEQ ID NO: 310241 - DNA, 25 bp, Probe Sequence
tttctgtccatcacctgtgtattgg

SEQ ID NO: 310242 - DNA, 25 bp, Probe Sequence
tttctttctccaggattgtcagtgg

SEQ ID NO: 310243 - DNA, 25 bp, Probe Sequence
tttcttgtcctagttgttccatgag

SEQ ID NO: 310244 - DNA, 25 bp, Probe Sequence
tttctttcatgttgtgggttctggg

SEQ ID NO: 310245 - DNA, 25 bp, Probe Sequence
tttctatggcagtgctgggccttcc

SEQ ID NO: 310246 - DNA, 25 bp, Probe Sequence
tttctctggagttggggctcttggc

SEQ ID NO: 310247 - DNA, 25 bp, Probe Sequence
tttctctcggttcagtcctgagtgc

SEQ ID NO: 310248 - DNA, 25 bp, Probe Sequence
tttcccagtgtacgactacgatcca

SEQ ID NO: 310249 - DNA, 25 bp, Probe Sequence
tttcccagatgataacattgaggcc

SEQ ID NO: 310250 - DNA, 25 bp, Probe Sequence
tttcacacaggaaacagctatgacc

SEQ ID NO: 310251 - DNA, 25 bp, Probe Sequence
tttcacacaggaaacagctatgacc

SEQ ID NO: 310252 - DNA, 25 bp, Probe Sequence
tttcacacaggaaacagctatgacc

SEQ ID NO: 310253 - DNA, 25 bp, Probe Sequence
tttcaccatgtgaggcagggagccc

SEQ ID NO: 310254 - DNA, 25 bp, Probe Sequence
tttcaccatgtgaggcagggagccc

SEQ ID NO: 310255 - DNA, 25 bp, Probe Sequence
tttcaccatgttggccaggctggtc

SEQ ID NO: 310256 - DNA, 25 bp, Probe Sequence
tttctcttcttgggagacatctgtc

SEQ ID NO: 310257 - DNA, 25 bp, Probe Sequence
tttcatcattcggcgtgcgaattaa

SEQ ID NO: 310258 - DNA, 25 bp, Probe Sequence
tttcattttgcactgaggatattca

SEQ ID NO: 310259 - DNA, 25 bp, Probe Sequence
tttcagttattccagattatctagc

SEQ ID NO: 310260 - DNA, 25 bp, Probe Sequence
tttatgtctactgtaaacattgctt

SEQ ID NO: 310261 - DNA, 25 bp, Probe Sequence
tttatgtccctagtaatgcctatgc

SEQ ID NO: 310262 - DNA, 25 bp, Probe Sequence
tttagtgttcgttcaagcctagcaa

SEQ ID NO: 310263 - DNA, 25 bp, Probe Sequence
tttagatttgtattcaggcaaagca

SEQ ID NO: 310264 - DNA, 25 bp, Probe Sequence
tttctgttcattttgcacctaaaca

SEQ ID NO: 310265 - DNA, 25 bp, Probe Sequence
tttctgtgtgattattccctagtga

SEQ ID NO: 310266 - DNA, 25 bp, Probe Sequence
tttcttgtaggcatcaccatgaaca

SEQ ID NO: 310267 - DNA, 25 bp, Probe Sequence
ttttattagtgctttgccagaggct

SEQ ID NO: 310268 - DNA, 25 bp, Probe Sequence
tttcttgtcaagtcctgtgcagagg

SEQ ID NO: 310269 - DNA, 25 bp, Probe Sequence
tttcttccaaacaggctcagagggt

SEQ ID NO: 310270 - DNA, 25 bp, Probe Sequence
tttctctcccaactggagctatgac

SEQ ID NO: 310271 - DNA, 25 bp, Probe Sequence
ttttgtctgtagatggcagtatgac

SEQ ID NO: 310272 - DNA, 25 bp, Probe Sequence
tttaacttctgcagtgccttcacta

SEQ ID NO: 310273 - DNA, 25 bp, Probe Sequence
tttagagcaatctgaccctggcatt

SEQ ID NO: 310274 - DNA, 25 bp, Probe Sequence
tttatacagcaccagacgcgatggc

SEQ ID NO: 310275 - DNA, 25 bp, Probe Sequence
tttatagcactgaatgcctacagga

SEQ ID NO: 310276 - DNA, 25 bp, Probe Sequence
tttcacccttcagcaacatgcagag

SEQ ID NO: 310277 - DNA, 25 bp, Probe Sequence
tttctccctctcactgtctgagagt

SEQ ID NO: 310278 - DNA, 25 bp, Probe Sequence
tttctctcctgctaattcctgaaga

SEQ ID NO: 310279 - DNA, 25 bp, Probe Sequence
tttcattcccaccattgcattacaa

SEQ ID NO: 310280 - DNA, 25 bp, Probe Sequence
tttcattcttcagtcttcggaaatg

SEQ ID NO: 310281 - DNA, 25 bp, Probe Sequence
tttcgtttgcattgtctttaatata

SEQ ID NO: 310282 - DNA, 25 bp, Probe Sequence
tttagtttcaaggtttcaatagaat

SEQ ID NO: 310283 - DNA, 25 bp, Probe Sequence
tttagttcaccagcttttgaaagtt

SEQ ID NO: 310284 - DNA, 25 bp, Probe Sequence
ttatcagggaacactctcaggaaca

SEQ ID NO: 310285 - DNA, 25 bp, Probe Sequence
tttcagaggaacatcgtcacaacga

SEQ ID NO: 310286 - DNA, 25 bp, Probe Sequence
tttcttgcgttcatccataccaaca

SEQ ID NO: 310287 - DNA, 25 bp, Probe Sequence
ttttggccgctcgcaataccaaagt

SEQ ID NO: 310288 - DNA, 25 bp, Probe Sequence
ttttagctggccacaaaaccaagaa

SEQ ID NO: 310289 - DNA, 25 bp, Probe Sequence
tttcttctacctctatatcaccaaa

SEQ ID NO: 310290 - DNA, 25 bp, Probe Sequence
tttcttgtatctccgttgattccaa

SEQ ID NO: 310291 - DNA, 25 bp, Probe Sequence
tttcttgttgtgtcctggattccga

SEQ ID NO: 310292 - DNA, 25 bp, Probe Sequence
tttcattttggctctgtcattttca

SEQ ID NO: 310293 - DNA, 25 bp, Probe Sequence
tttcattttatcccttatatttcta

SEQ ID NO: 310294 - DNA, 25 bp, Probe Sequence
tttcttcttaaagtattacttctca

SEQ ID NO: 310295 - DNA, 25 bp, Probe Sequence
tttctttctagatgtattccccaac

SEQ ID NO: 310296 - DNA, 25 bp, Probe Sequence
ttttgatgtctccaagtagtccacc

SEQ ID NO: 310297 - DNA, 25 bp, Probe Sequence
ttttagtaaccggatgtccaccatg

SEQ ID NO: 310298 - DNA, 25 bp, Probe Sequence
tttagtaaccggatgtccaccatga

SEQ ID NO: 310299 - DNA, 25 bp, Probe Sequence
tttaaaatccttattctcctgctga

SEQ ID NO: 310300 - DNA, 25 bp, Probe Sequence
ttgtaaaatgccaggttttttatgg

SEQ ID NO: 310301 - DNA, 25 bp, Probe Sequence
tttcattatctgcctgggttttttt

SEQ ID NO: 310302 - DNA, 25 bp, Probe Sequence
tttctgtctctatggttttatctat

SEQ ID NO: 310303 - DNA, 25 bp, Probe Sequence
tttcttcctatcggtgtgtctagca

SEQ ID NO: 310304 - DNA, 25 bp, Probe Sequence
ttttctcactgagcgtctgttgaaa

SEQ ID NO: 310305 - DNA, 25 bp, Probe Sequence
tttctgccacttagcacttgtataa

SEQ ID NO: 310306 - DNA, 25 bp, Probe Sequence
tttctgacactttcacttttgcaga

SEQ ID NO: 310307 - DNA, 25 bp, Probe Sequence
ttttaagttcccatttgaaattgct

SEQ ID NO: 310308 - DNA, 25 bp, Probe Sequence
tttaaaaattccacattgaagttgt

SEQ ID NO: 310309 - DNA, 25 bp, Probe Sequence
ttaaagagaattccctatttatttg

SEQ ID NO: 310310 - DNA, 25 bp, Probe Sequence
tttacagggaagcttattctgtttt

SEQ ID NO: 310311 - DNA, 25 bp, Probe Sequence
tttaaaggataggtcttgctctgtt

SEQ ID NO: 310312 - DNA, 25 bp, Probe Sequence
tttaatgttgtctgtcttctgtgct

SEQ ID NO: 310313 - DNA, 25 bp, Probe Sequence
tttaatgttgtctgtcttctgtgct

SEQ ID NO: 310314 - DNA, 25 bp, Probe Sequence
tttaatgttgtctgtcttctgtgct

SEQ ID NO: 310315 - DNA, 25 bp, Probe Sequence
tttcaatggttcttttgtcgatgcc

SEQ ID NO: 310316 - DNA, 25 bp, Probe Sequence
tttaactcttgacctgtatgcagct

SEQ ID NO: 310317 - DNA, 25 bp, Probe Sequence
tttctagtcctattctattgcagtt

SEQ ID NO: 310318 - DNA, 25 bp, Probe Sequence
tttctagtatttgtattgcaatttt

SEQ ID NO: 310319 - DNA, 25 bp, Probe Sequence
tttctagtttctatatagtgcaata

SEQ ID NO: 310320 - DNA, 25 bp, Probe Sequence
tttctgtgttctggaataagagaat

SEQ ID NO: 310321 - DNA, 25 bp, Probe Sequence
tttctgttctctggctatttgcaaa

SEQ ID NO: 310322 - DNA, 25 bp, Probe Sequence
tttcttactctgttaatacacatca

SEQ ID NO: 310323 - DNA, 25 bp, Probe Sequence
tttctttcttgttcaattcatctag

SEQ ID NO: 310324 - DNA, 25 bp, Probe Sequence
tttctcttgtgtcaagctctacttg

SEQ ID NO: 310325 - DNA, 25 bp, Probe Sequence
tttcgcttgagtcatcagccaacag

SEQ ID NO: 310326 - DNA, 25 bp, Probe Sequence
tttcagttcagcagatcaacaggat

SEQ ID NO: 310327 - DNA, 25 bp, Probe Sequence
tttcagcttcagcttaactgacaga

SEQ ID NO: 310328 - DNA, 25 bp, Probe Sequence
ttgtcttgtgcccttaactacgaac

SEQ ID NO: 310329 - DNA, 25 bp, Probe Sequence
tttcttgctgtccaatttctattaa

SEQ ID NO: 310330 - DNA, 25 bp, Probe Sequence
tttcgtgtacccattctgtttcagg

SEQ ID NO: 310331 - DNA, 25 bp, Probe Sequence
tttcgtgtacccattctgtttcagg

SEQ ID NO: 310332 - DNA, 25 bp, Probe Sequence
tttaggtacctaccacttcttcaca

SEQ ID NO: 310333 - DNA, 25 bp, Probe Sequence
tttagagatacaaagtactactaca

SEQ ID NO: 310334 - DNA, 25 bp, Probe Sequence
tttaacatgaacagatttcttgaat

SEQ ID NO: 310335 - DNA, 25 bp, Probe Sequence
tttaggcatgtgttagatttctgtg

SEQ ID NO: 310336 - DNA, 25 bp, Probe Sequence
tttaggtgtgagatgtttcagtgaa

SEQ ID NO: 310337 - DNA, 25 bp, Probe Sequence
tttacggggatcctttgcatgtcag

SEQ ID NO: 310338 - DNA, 25 bp, Probe Sequence
tttactgggagtgagttcattgacc

SEQ ID NO: 310339 - DNA, 25 bp, Probe Sequence
tttcactaccctgagtctcatttcc

SEQ ID NO: 310340 - DNA, 25 bp, Probe Sequence
tttaaagccacatagttccttccct

SEQ ID NO: 310341 - DNA, 25 bp, Probe Sequence
ttataagaccaagcgagtcctccct

SEQ ID NO: 310342 - DNA, 25 bp, Probe Sequence
ttataagaccaagcgagtcctccct

SEQ ID NO: 310343 - DNA, 25 bp, Probe Sequence
tttatgaattcatgcccttccttta

SEQ ID NO: 310344 - DNA, 25 bp, Probe Sequence
tttaccattaatcacttctcaataa

SEQ ID NO: 310345 - DNA, 25 bp, Probe Sequence
tttcacttatagattcaggtaatat

SEQ ID NO: 310346 - DNA, 25 bp, Probe Sequence
tttcacttacagtaggagtcaacaa

SEQ ID NO: 310347 - DNA, 25 bp, Probe Sequence
tttcatttacattaacagataacat

SEQ ID NO: 310348 - DNA, 25 bp, Probe Sequence
tttcatgttacataataacccaaaa

SEQ ID NO: 310349 - DNA, 25 bp, Probe Sequence
ttttttccttacagacacccataat

SEQ ID NO: 310350 - DNA, 25 bp, Probe Sequence
tttatacccttagctttcccataag

SEQ ID NO: 310351 - DNA, 25 bp, Probe Sequence
tttatagccaggtaccttctcacct

SEQ ID NO: 310352 - DNA, 25 bp, Probe Sequence
tttctggaagcctacgtttcccatt

SEQ ID NO: 310353 - DNA, 25 bp, Probe Sequence
tttagtgataccgtcagtttcgcct

SEQ ID NO: 310354 - DNA, 25 bp, Probe Sequence
tttttgatatgctccagattgtggc

SEQ ID NO: 310355 - DNA, 25 bp, Probe Sequence
tttattcataacccagctgtggacc

SEQ ID NO: 310356 - DNA, 25 bp, Probe Sequence
tttaaataacgtctgtgcctccact

SEQ ID NO: 310357 - DNA, 25 bp, Probe Sequence
tttaaaaacatgcagcttccctctc

SEQ ID NO: 310358 - DNA, 25 bp, Probe Sequence
tttagaaaggtgccgattcaccaac

SEQ ID NO: 310359 - DNA, 25 bp, Probe Sequence
tttaatacgtgagcgtgctaaaagc

SEQ ID NO: 310360 - DNA, 25 bp, Probe Sequence
tttcataactgcagtccttcaaaga

SEQ ID NO: 310361 - DNA, 25 bp, Probe Sequence
tttaatacctgtgccattctcaata

SEQ ID NO: 310362 - DNA, 25 bp, Probe Sequence
tttaatcccttaagcatttgatgaa

SEQ ID NO: 310363 - DNA, 25 bp, Probe Sequence
tttagtgacgtttacattttgaaat

SEQ ID NO: 310364 - DNA, 25 bp, Probe Sequence
tttcacgttggtttctgcttttaat

SEQ ID NO: 310365 - DNA, 25 bp, Probe Sequence
tttcaccttttcttggtatattaag

SEQ ID NO: 310366 - DNA, 25 bp, Probe Sequence
tttacttttgtaatggtcattccag

SEQ ID NO: 310367 - DNA, 25 bp, Probe Sequence
tttagtgttgtttctttcacccagg

SEQ ID NO: 310368 - DNA, 25 bp, Probe Sequence
tttactattggtcatttgcagaaca

SEQ ID NO: 310369 - DNA, 25 bp, Probe Sequence
tttactgatctgcctctgttagagg

SEQ ID NO: 310370 - DNA, 25 bp, Probe Sequence
ttatcagtcctgctcttatacaatc

SEQ ID NO: 310371 - DNA, 25 bp, Probe Sequence
ttatgcaatttacttttaaagacaa

SEQ ID NO: 310372 - DNA, 25 bp, Probe Sequence
ttatgcagctttatggttccacaga

SEQ ID NO: 310373 - DNA, 25 bp, Probe Sequence
tttacatttatcagtttacagtttt

SEQ ID NO: 310374 - DNA, 25 bp, Probe Sequence
tttctcattttccagttggacaggc

SEQ ID NO: 310375 - DNA, 25 bp, Probe Sequence
tttctctttcaccacgtgtgaactg

SEQ ID NO: 310376 - DNA, 25 bp, Probe Sequence
tttctctgttaattcctggaactgt

SEQ ID NO: 310377 - DNA, 25 bp, Probe Sequence
tttctgtttaattgagtgaaactta

SEQ ID NO: 310378 - DNA, 25 bp, Probe Sequence
tttcttttaaggtgacccatctgtg

SEQ ID NO: 310379 - DNA, 25 bp, Probe Sequence
ttttgtcttcaacttggaccaattg

SEQ ID NO: 310380 - DNA, 25 bp, Probe Sequence
tttattttccactcagattaatatg

SEQ ID NO: 310381 - DNA, 25 bp, Probe Sequence
ttttttggccgctcgcaataccaaa

SEQ ID NO: 310382 - DNA, 25 bp, Probe Sequence
ttaattttcctggtgccaatttcaa

SEQ ID NO: 310383 - DNA, 25 bp, Probe Sequence
ttaaaagccactgttacatttcaaa

SEQ ID NO: 310384 - DNA, 25 bp, Probe Sequence
tttcaaagctactgttcctagtcca

SEQ ID NO: 310385 - DNA, 25 bp, Probe Sequence
tttaaattatgccgttacttttcat

SEQ ID NO: 310386 - DNA, 25 bp, Probe Sequence
tttagtaaatcccttcagtatttat

SEQ ID NO: 310387 - DNA, 25 bp, Probe Sequence
ttggattaatccggttcttttctct

SEQ ID NO: 310388 - DNA, 25 bp, Probe Sequence
tttcattaaaggcttctctctcacc

SEQ ID NO: 310389 - DNA, 25 bp, Probe Sequence
tttcagtaaagccctctgttacatc

SEQ ID NO: 310390 - DNA, 25 bp, Probe Sequence
tttctgtaactcctttgtgctacca

SEQ ID NO: 310391 - DNA, 25 bp, Probe Sequence
ttttcctagctacatctggtacctt

SEQ ID NO: 310392 - DNA, 25 bp, Probe Sequence
ttcttctagggacatgggtactctt

SEQ ID NO: 310393 - DNA, 25 bp, Probe Sequence
ttttctaatagacaagtgtaatctc

SEQ ID NO: 310394 - DNA, 25 bp, Probe Sequence
ttttaaacagggcttgctacatcaa

SEQ ID NO: 310395 - DNA, 25 bp, Probe Sequence
ttatctagaaaggtcgttcccagca

SEQ ID NO: 310396 - DNA, 25 bp, Probe Sequence
ttattatgtaagggtcattagacaa

SEQ ID NO: 310397 - DNA, 25 bp, Probe Sequence
ttgtttggaacttgtcataaaatcg

SEQ ID NO: 310398 - DNA, 25 bp, Probe Sequence
tttctattgatgtcttggctaaatt

SEQ ID NO: 310399 - DNA, 25 bp, Probe Sequence
tttctatctctgtggacttacagtc

SEQ ID NO: 310400 - DNA, 25 bp, Probe Sequence
tttctgagcctttgagactgttcct

SEQ ID NO: 310401 - DNA, 25 bp, Probe Sequence
tttctcctcatcaaaagcatttctt

SEQ ID NO: 310402 - DNA, 25 bp, Probe Sequence
tttctctctataagtttctgtcatt

SEQ ID NO: 310403 - DNA, 25 bp, Probe Sequence
tttctgtctaatttcactctgttcc

SEQ ID NO: 310404 - DNA, 25 bp, Probe Sequence
tttctactacgctaacgtttcagca

SEQ ID NO: 310405 - DNA, 25 bp, Probe Sequence
ttttactagagatgaggatttccca

SEQ ID NO: 310406 - DNA, 25 bp, Probe Sequence
ttttcctacaactagtatggtccca

SEQ ID NO: 310407 - DNA, 25 bp, Probe Sequence
tttctccccaactatgcatctgttg

SEQ ID NO: 310408 - DNA, 25 bp, Probe Sequence
tttctcacctattttgtgtgtgtga

SEQ ID NO: 310409 - DNA, 25 bp, Probe Sequence
tttcagcactttctcatctgtggag

SEQ ID NO: 310410 - DNA, 25 bp, Probe Sequence
tttcagcacttacatcatttggtac

SEQ ID NO: 310411 - DNA, 25 bp, Probe Sequence
ttagtccatagaggtccctggctac

SEQ ID NO: 310412 - DNA, 25 bp, Probe Sequence
tttcttctatggatctcctggtagc

SEQ ID NO: 310413 - DNA, 25 bp, Probe Sequence
tttcttcacagccagtttctgatgg

SEQ ID NO: 310414 - DNA, 25 bp, Probe Sequence
ttttcccattgacgtacaatgggtg

SEQ ID NO: 310415 - DNA, 25 bp, Probe Sequence
tttctaccttggcagaacatgtacg

SEQ ID NO: 310416 - DNA, 25 bp, Probe Sequence
tttctacggttgcaaactgctgacc

SEQ ID NO: 310417 - DNA, 25 bp, Probe Sequence
tttctacggttgcaaactgctgacc

SEQ ID NO: 310418 - DNA, 25 bp, Probe Sequence
ttatttaggtctcaacagctctgga

SEQ ID NO: 310419 - DNA, 25 bp, Probe Sequence
tttttgcacgtccttagcagttctc

SEQ ID NO: 310420 - DNA, 25 bp, Probe Sequence
ttttgatgccgtactgtaagctccg

SEQ ID NO: 310421 - DNA, 25 bp, Probe Sequence
tttagcagctctctccaaagctgtc

SEQ ID NO: 310422 - DNA, 25 bp, Probe Sequence
tttatgtctgctttacaacagcctc

SEQ ID NO: 310423 - DNA, 25 bp, Probe Sequence
tttattggaactgagcaagcctctt

SEQ ID NO: 310424 - DNA, 25 bp, Probe Sequence
tttcattttggtgtgcaaccctgtc

SEQ ID NO: 310425 - DNA, 25 bp, Probe Sequence
tttcttattgaggccctgtaccttc

SEQ ID NO: 310426 - DNA, 25 bp, Probe Sequence
tttctatgttcctccttaactatac

SEQ ID NO: 310427 - DNA, 25 bp, Probe Sequence
tttctttctccatgccttagttaga

SEQ ID NO: 310428 - DNA, 25 bp, Probe Sequence
tttctcttctccagtaataaacaat

SEQ ID NO: 310429 - DNA, 25 bp, Probe Sequence
tttctgcttgtgcctttagaaatac

SEQ ID NO: 310430 - DNA, 25 bp, Probe Sequence
tttcttctgtgttgaaatgaagtac

SEQ ID NO: 310431 - DNA, 25 bp, Probe Sequence
ttggttctgtgtttcctacggaaat

SEQ ID NO: 310432 - DNA, 25 bp, Probe Sequence
ttggttttacttgcaattgtagaat

SEQ ID NO: 310433 - DNA, 25 bp, Probe Sequence
tttcttcttactagccactattaaa

SEQ ID NO: 310434 - DNA, 25 bp, Probe Sequence
tttcttttttccggcgttcaagatg

SEQ ID NO: 310435 - DNA, 25 bp, Probe Sequence
tttctttgattctcaaagttcagca

SEQ ID NO: 310436 - DNA, 25 bp, Probe Sequence
tttctcagtggtctagaaaatcaga

SEQ ID NO: 310437 - DNA, 25 bp, Probe Sequence
tttctgctgtggtctataaaataaa

SEQ ID NO: 310438 - DNA, 25 bp, Probe Sequence
tttcatgttgatgatatacacaatg

SEQ ID NO: 310439 - DNA, 25 bp, Probe Sequence
tttatgtgatgtgtattccattccg

SEQ ID NO: 310440 - DNA, 25 bp, Probe Sequence
tttcattgtgttcattgcctcatcc

SEQ ID NO: 310441 - DNA, 25 bp, Probe Sequence
tttcattgtgttcattgcctcatcc

SEQ ID NO: 310442 - DNA, 25 bp, Probe Sequence
tttcattgtgttcattgcctcatcc

SEQ ID NO: 310443 - DNA, 25 bp, Probe Sequence
tttcagcaggttccagtgcctgact

SEQ ID NO: 310444 - DNA, 25 bp, Probe Sequence
tttcacagcaagaacagtccatgtt

SEQ ID NO: 310445 - DNA, 25 bp, Probe Sequence
tttctctgaaggaagcccatgcttc

SEQ ID NO: 310446 - DNA, 25 bp, Probe Sequence
tttcagtgaacacacccctataacc

SEQ ID NO: 310447 - DNA, 25 bp, Probe Sequence
tttttgacacatacacccctaattc

SEQ ID NO: 310448 - DNA, 25 bp, Probe Sequence
tttttgaaacagaaccataaagcat

SEQ ID NO: 310449 - DNA, 25 bp, Probe Sequence
ttattttcaaaagcactacaggccc

SEQ ID NO: 310450 - DNA, 25 bp, Probe Sequence
ttttttggcaaaatccccagagcca

SEQ ID NO: 310451 - DNA, 25 bp, Probe Sequence
tttttggcaaaatccccagagccaa

SEQ ID NO: 310452 - DNA, 25 bp, Probe Sequence
ttttgtggttatattcccaacaaca

SEQ ID NO: 310453 - DNA, 25 bp, Probe Sequence
tttttggtatcatgttcaaccaaca

SEQ ID NO: 310454 - DNA, 25 bp, Probe Sequence
tttttgcatcagtcacgttaaccag

SEQ ID NO: 310455 - DNA, 25 bp, Probe Sequence
tttctaatagacaagtgtaatctca

SEQ ID NO: 310456 - DNA, 25 bp, Probe Sequence
tttctcaatctgtctactcttatct

SEQ ID NO: 310457 - DNA, 25 bp, Probe Sequence
tttctacacatttaggctgtatttc

SEQ ID NO: 310458 - DNA, 25 bp, Probe Sequence
tttctcagacttgttgtctattatc

SEQ ID NO: 310459 - DNA, 25 bp, Probe Sequence
tttctcaagccgtttttattacact

SEQ ID NO: 310460 - DNA, 25 bp, Probe Sequence
tttctccaatccttgatccgtaaca

SEQ ID NO: 310461 - DNA, 25 bp, Probe Sequence
tttctacattcccattcacttaaca

SEQ ID NO: 310462 - DNA, 25 bp, Probe Sequence
tttcatacattctcatacatttaac

SEQ ID NO: 310463 - DNA, 25 bp, Probe Sequence
tttatccatgtctctagcaatctat

SEQ ID NO: 310464 - DNA, 25 bp, Probe Sequence
tttacatatgaacctcagttctgaa

SEQ ID NO: 310465 - DNA, 25 bp, Probe Sequence
tttcaatatgcaagttaggcttaat

SEQ ID NO: 310466 - DNA, 25 bp, Probe Sequence
tttcacaatgtcgtgctaaataaat

SEQ ID NO: 310467 - DNA, 25 bp, Probe Sequence
tttctcattgccattggaatagaat

SEQ ID NO: 310468 - DNA, 25 bp, Probe Sequence
tttcttctgccaatttactatgatt

SEQ ID NO: 310469 - DNA, 25 bp, Probe Sequence
tttcttctgccaatttactatgatt

SEQ ID NO: 310470 - DNA, 25 bp, Probe Sequence
tttcttctgccaatttactatgatt

SEQ ID NO: 310471 - DNA, 25 bp, Probe Sequence
tttctctttatgataactatgataa

SEQ ID NO: 310472 - DNA, 25 bp, Probe Sequence
tttctcttttactaaacaatgcctg

SEQ ID NO: 310473 - DNA, 25 bp, Probe Sequence
tttcttttttgctgtactgcatgca

SEQ ID NO: 310474 - DNA, 25 bp, Probe Sequence
ttccttctgggagttgtactgctag

SEQ ID NO: 310475 - DNA, 25 bp, Probe Sequence
ttcctgttgggcttttagctctgtg

SEQ ID NO: 310476 - DNA, 25 bp, Probe Sequence
tttatgtttggcttatttactggtc

SEQ ID NO: 310477 - DNA, 25 bp, Probe Sequence
tttaatcaaggcttttaacatgaac

SEQ ID NO: 310478 - DNA, 25 bp, Probe Sequence
tttcagatacaagcatgtaacaaaa

SEQ ID NO: 310479 - DNA, 25 bp, Probe Sequence
ttgtcactactagattataaaaact

SEQ ID NO: 310480 - DNA, 25 bp, Probe Sequence
ttttgctacgggccctagacaatac

SEQ ID NO: 310481 - DNA, 25 bp, Probe Sequence
ttttatatgccgctgctttgaaaga

SEQ ID NO: 310482 - DNA, 25 bp, Probe Sequence
tttcttggccacctcaatagcagaa

SEQ ID NO: 310483 - DNA, 25 bp, Probe Sequence
tttctagagctctgtcactatctga

SEQ ID NO: 310484 - DNA, 25 bp, Probe Sequence
tttctagcatcctgacatcactgtt

SEQ ID NO: 310485 - DNA, 25 bp, Probe Sequence
tttctactgatctgatctcactgtt

SEQ ID NO: 310486 - DNA, 25 bp, Probe Sequence
tttcattgtgtagacatactgtatt

SEQ ID NO: 310487 - DNA, 25 bp, Probe Sequence
tttcattttgttgccctggatcttt

SEQ ID NO: 310488 - DNA, 25 bp, Probe Sequence
tttctagttataaccaccagccgtt

SEQ ID NO: 310489 - DNA, 25 bp, Probe Sequence
tttctacaaataattgccccctttg

SEQ ID NO: 310490 - DNA, 25 bp, Probe Sequence
tttctaacaataattcacacctgaa

SEQ ID NO: 310491 - DNA, 25 bp, Probe Sequence
ttggcaactgactagttcccctaat

SEQ ID NO: 310492 - DNA, 25 bp, Probe Sequence
ttctaaccccaggtacccatgaatg

SEQ ID NO: 310493 - DNA, 25 bp, Probe Sequence
ttaaaccggcattgtattccaaaga

SEQ ID NO: 310494 - DNA, 25 bp, Probe Sequence
tttaactctatgtgtactccaaagt

SEQ ID NO: 310495 - DNA, 25 bp, Probe Sequence
tttaccgccagatgaaatcgaacag

SEQ ID NO: 310496 - DNA, 25 bp, Probe Sequence
tttcaatgcccagaaagaaaaagcc

SEQ ID NO: 310497 - DNA, 25 bp, Probe Sequence
tttacatcccacagaggaaacagaa

SEQ ID NO: 310498 - DNA, 25 bp, Probe Sequence
tttacacccacatacagtacaaaag

SEQ ID NO: 310499 - DNA, 25 bp, Probe Sequence
tttcataccccagataagagctaaa

SEQ ID NO: 310500 - DNA, 25 bp, Probe Sequence
tttcaaccccatctacagaaattca

SEQ ID NO: 310501 - DNA, 25 bp, Probe Sequence
ttttgagcccttcagaagacattct

SEQ ID NO: 310502 - DNA, 25 bp, Probe Sequence
ttttgacctccatagaagaccccgg

SEQ ID NO: 310503 - DNA, 25 bp, Probe Sequence
ttttgacctccatagaagaccccgg

SEQ ID NO: 310504 - DNA, 25 bp, Probe Sequence
tttttcagcctataaagccccctgt

SEQ ID NO: 310505 - DNA, 25 bp, Probe Sequence
tttttaactaaacagccaatggtat

SEQ ID NO: 310506 - DNA, 25 bp, Probe Sequence
tttttaataatatcggccgctgttt

SEQ ID NO: 310507 - DNA, 25 bp, Probe Sequence
tttttggaagtatttggcattgcta

SEQ ID NO: 310508 - DNA, 25 bp, Probe Sequence
tttcttcagaacaatgtagacttcc

SEQ ID NO: 310509 - DNA, 25 bp, Probe Sequence
tttcattcaccaatagtggcctatt

SEQ ID NO: 310510 - DNA, 25 bp, Probe Sequence
tttctcacatcctgtgggactctgt

SEQ ID NO: 310511 - DNA, 25 bp, Probe Sequence
tttaatgatgcgtgtggaatgtgtg

SEQ ID NO: 310512 - DNA, 25 bp, Probe Sequence
tttaagatgctgtgctgtaaaatac

SEQ ID NO: 310513 - DNA, 25 bp, Probe Sequence
tttaaatgtgatagtctcagaaaca

SEQ ID NO: 310514 - DNA, 25 bp, Probe Sequence
tttaaagctatggcatcatataatt

SEQ ID NO: 310515 - DNA, 25 bp, Probe Sequence
tttaatagcttggagacatgagaca

SEQ ID NO: 310516 - DNA, 25 bp, Probe Sequence
tttaatatgttacaaggcacttgag

SEQ ID NO: 310517 - DNA, 25 bp, Probe Sequence
tttcacaaggtacaaaatcttgcat

SEQ ID NO: 310518 - DNA, 25 bp, Probe Sequence
tttagggttttgtaaatcttcatag

SEQ ID NO: 310519 - DNA, 25 bp, Probe Sequence
tttaaggttttcttgagagcctgta

SEQ ID NO: 310520 - DNA, 25 bp, Probe Sequence
tttaatgagtgctttagtgagtcct

SEQ ID NO: 310521 - DNA, 25 bp, Probe Sequence
tttactgagctcattatgatgttcc

SEQ ID NO: 310522 - DNA, 25 bp, Probe Sequence
tttacatgttccaatatgattccac

SEQ ID NO: 310523 - DNA, 25 bp, Probe Sequence
tttaagcttctttcatgtattcaaa

SEQ ID NO: 310524 - DNA, 25 bp, Probe Sequence
tttaacttcacttcatgctgatgat

SEQ ID NO: 310525 - DNA, 25 bp, Probe Sequence
tttaacttcacttcatgctgatgat

SEQ ID NO: 310526 - DNA, 25 bp, Probe Sequence
tttacactaactttctgcagtccct

SEQ ID NO: 310527 - DNA, 25 bp, Probe Sequence
tttacatgctgaattagcctcgatc

SEQ ID NO: 310528 - DNA, 25 bp, Probe Sequence
tttcatctgcaaaaatcctcaggaa

SEQ ID NO: 310529 - DNA, 25 bp, Probe Sequence
tttcttccaaaaatgctcagagtac

SEQ ID NO: 310530 - DNA, 25 bp, Probe Sequence
tttcttccagatgcagactctcagt

SEQ ID NO: 310531 - DNA, 25 bp, Probe Sequence
ttttctccagattagcacctggcca

SEQ ID NO: 310532 - DNA, 25 bp, Probe Sequence
ttatcttctctttgagagcttggta

SEQ ID NO: 310533 - DNA, 25 bp, Probe Sequence
tttctttcttagtgtctgagggtca

SEQ ID NO: 310534 - DNA, 25 bp, Probe Sequence
tttcttgtctttgtgttctgtggta

SEQ ID NO: 310535 - DNA, 25 bp, Probe Sequence
tttcttatcttctgtgcttttggtc

SEQ ID NO: 310536 - DNA, 25 bp, Probe Sequence
tttcttttcacattaggctgttggt

SEQ ID NO: 310537 - DNA, 25 bp, Probe Sequence
tttcttcctctttcaccatgtgagg

SEQ ID NO: 310538 - DNA, 25 bp, Probe Sequence
tttcttcctctttcaccatgtgagg

SEQ ID NO: 310539 - DNA, 25 bp, Probe Sequence
tttcttccctttcagcatctgagaa

SEQ ID NO: 310540 - DNA, 25 bp, Probe Sequence
tttcttttctttctcatcttgatga

SEQ ID NO: 310541 - DNA, 25 bp, Probe Sequence
tttcttcttgtactatatcctttgc

SEQ ID NO: 310542 - DNA, 25 bp, Probe Sequence
tttcttcttgagtaatcacaccatt

SEQ ID NO: 310543 - DNA, 25 bp, Probe Sequence
tttcttcctcagaaatgctccacct

SEQ ID NO: 310544 - DNA, 25 bp, Probe Sequence
tttcttcttcattaattctccatct

SEQ ID NO: 310545 - DNA, 25 bp, Probe Sequence
tttctactgcacttacattcaacac

SEQ ID NO: 310546 - DNA, 25 bp, Probe Sequence
tttagactgcccacattcatgaaga

SEQ ID NO: 310547 - DNA, 25 bp, Probe Sequence
tttcaactcactaccattcattagt

SEQ ID NO: 310548 - DNA, 25 bp, Probe Sequence
tttaattagtcaggcatccattttg

SEQ ID NO: 310549 - DNA, 25 bp, Probe Sequence
tttaatgcgggagctgcgatttaca

SEQ ID NO: 310550 - DNA, 25 bp, Probe Sequence
tttagtgttggaactgcctcttatt

SEQ ID NO: 310551 - DNA, 25 bp, Probe Sequence
tttactttgtacttgtgtttgctta

SEQ ID NO: 310552 - DNA, 25 bp, Probe Sequence
tttaccctcttctattgaattgcct

SEQ ID NO: 310553 - DNA, 25 bp, Probe Sequence
tttaccctcttctattgaattgcct

SEQ ID NO: 310554 - DNA, 25 bp, Probe Sequence
tttaccctcttctattgaattgcct

SEQ ID NO: 310555 - DNA, 25 bp, Probe Sequence
tttacacccttgttctgtcaaagca

SEQ ID NO: 310556 - DNA, 25 bp, Probe Sequence
tttaactgcctttttgtcgagtcaa

SEQ ID NO: 310557 - DNA, 25 bp, Probe Sequence
tttaacttcctttatgtagattcta

SEQ ID NO: 310558 - DNA, 25 bp, Probe Sequence
tttaacttcctcatcagaactctgc

SEQ ID NO: 310559 - DNA, 25 bp, Probe Sequence
tttaacttcctcatcagaactctgc

SEQ ID NO: 310560 - DNA, 25 bp, Probe Sequence
tttacatttcagacctaaagctggc

SEQ ID NO: 310561 - DNA, 25 bp, Probe Sequence
ttaactggactgacctaaacgtgga

SEQ ID NO: 310562 - DNA, 25 bp, Probe Sequence
ttagatctgggcaccaataaaggcg

SEQ ID NO: 310563 - DNA, 25 bp, Probe Sequence
ttattcttccgcggagttaagggct

SEQ ID NO: 310564 - DNA, 25 bp, Probe Sequence
tttcttatccgagagagtgagagcg

SEQ ID NO: 310565 - DNA, 25 bp, Probe Sequence
tttcatgtcactggtggtggggatc

SEQ ID NO: 310566 - DNA, 25 bp, Probe Sequence
tttcagatcactgcggtgggctgga

SEQ ID NO: 310567 - DNA, 25 bp, Probe Sequence
tttcaactctcccagtgaggataat

SEQ ID NO: 310568 - DNA, 25 bp, Probe Sequence
tttacacctgccaagtggagcaccc

SEQ ID NO: 310569 - DNA, 25 bp, Probe Sequence
tttacacctgccaagtggagcaccc

SEQ ID NO: 310570 - DNA, 25 bp, Probe Sequence
tttaactctgtgaagttagttcctt

SEQ ID NO: 310571 - DNA, 25 bp, Probe Sequence
tttagcagctttgtcgtcatgtagc

SEQ ID NO: 310572 - DNA, 25 bp, Probe Sequence
tttagtgtgattgatagtatctaga

SEQ ID NO: 310573 - DNA, 25 bp, Probe Sequence
tttacttgcttccattgtgtctgaa

SEQ ID NO: 310574 - DNA, 25 bp, Probe Sequence
tttacttgctttcttactgacagca

SEQ ID NO: 310575 - DNA, 25 bp, Probe Sequence
tttcattttgttctgtactaagaga

SEQ ID NO: 310576 - DNA, 25 bp, Probe Sequence
tttctttttctcttgcttctaaggg

SEQ ID NO: 310577 - DNA, 25 bp, Probe Sequence
tttttatttcacagttatcagggga

SEQ ID NO: 310578 - DNA, 25 bp, Probe Sequence
ttgtttttggacagttgatgggcaa

SEQ ID NO: 310579 - DNA, 25 bp, Probe Sequence
tttttttggactctgtgtgctgcct

SEQ ID NO: 310580 - DNA, 25 bp, Probe Sequence
tttttcgggactctgtattccctct

SEQ ID NO: 310581 - DNA, 25 bp, Probe Sequence
tttattctgggattcggtcattgga

SEQ ID NO: 310582 - DNA, 25 bp, Probe Sequence
ttttcagaggcctcagtgtagtgga

SEQ ID NO: 310583 - DNA, 25 bp, Probe Sequence
tttactggccactcagctgttgtag

SEQ ID NO: 310584 - DNA, 25 bp, Probe Sequence
tttcttgtccacagcacttttgata

SEQ ID NO: 310585 - DNA, 25 bp, Probe Sequence
tttcattgtctaacacacttctttt

SEQ ID NO: 310586 - DNA, 25 bp, Probe Sequence
tttattgttatattacttgcctatc

SEQ ID NO: 310587 - DNA, 25 bp, Probe Sequence
tttctatctcttgtactacactgaa

SEQ ID NO: 310588 - DNA, 25 bp, Probe Sequence
ttgctttagcttctggtcagcactg

SEQ ID NO: 310589 - DNA, 25 bp, Probe Sequence
tttcttgcaggtttgcttcaagctg

SEQ ID NO: 310590 - DNA, 25 bp, Probe Sequence
tttcatctcaccggtggctaagcgg

SEQ ID NO: 310591 - DNA, 25 bp, Probe Sequence
tttcttctctggcagctgcaaacgg

SEQ ID NO: 310592 - DNA, 25 bp, Probe Sequence
tttcttctgtcacaatgctaagtgg

SEQ ID NO: 310593 - DNA, 25 bp, Probe Sequence
tttcttactgcacaagaacagttat

SEQ ID NO: 310594 - DNA, 25 bp, Probe Sequence
ttttcttctaaatggtcgttctgtt

SEQ ID NO: 310595 - DNA, 25 bp, Probe Sequence
ttttcttgggtatggaggtttcttg

SEQ ID NO: 310596 - DNA, 25 bp, Probe Sequence
tttactgtggggtggggctgttgat

SEQ ID NO: 310597 - DNA, 25 bp, Probe Sequence
ttattcggtgagcggtggtggttta

SEQ ID NO: 310598 - DNA, 25 bp, Probe Sequence
ttatttcagtagtgtttggggaaca

SEQ ID NO: 310599 - DNA, 25 bp, Probe Sequence
ttaaagagctggtgtttggggactc

SEQ ID NO: 310600 - DNA, 25 bp, Probe Sequence
tttatacgcttaggctctctgggga

SEQ ID NO: 310601 - DNA, 25 bp, Probe Sequence
ttttgacgtgtttgtggtgcgcggg

SEQ ID NO: 310602 - DNA, 25 bp, Probe Sequence
ttttactggtgtggtttctctggca

SEQ ID NO: 310603 - DNA, 25 bp, Probe Sequence
tttcttcagtttcttgttcagccaa

SEQ ID NO: 310604 - DNA, 25 bp, Probe Sequence
ttttccacttttacttatgagcggg

SEQ ID NO: 310605 - DNA, 25 bp, Probe Sequence
tttcttcgctatctctcttatgaga

SEQ ID NO: 310606 - DNA, 25 bp, Probe Sequence
tttcttgcagtttttttatggcatt

SEQ ID NO: 310607 - DNA, 25 bp, Probe Sequence
tttcttgctttcttgtgttaaggta

SEQ ID NO: 310608 - DNA, 25 bp, Probe Sequence
tttcttgtgtctctggtgagaagtt

SEQ ID NO: 310609 - DNA, 25 bp, Probe Sequence
tttcattgtattctgtgagtgataa

SEQ ID NO: 310610 - DNA, 25 bp, Probe Sequence
ttagcaccatgaactcgtactatga

SEQ ID NO: 310611 - DNA, 25 bp, Probe Sequence
tttcaccagtgacgcgttctagcag

SEQ ID NO: 310612 - DNA, 25 bp, Probe Sequence
tttcacaaatggcagacttgaagat

SEQ ID NO: 310613 - DNA, 25 bp, Probe Sequence
tttactaattcgcatctggaagctc

SEQ ID NO: 310614 - DNA, 25 bp, Probe Sequence
tttagccattcatgaatctgccccc

SEQ ID NO: 310615 - DNA, 25 bp, Probe Sequence
tttatgagattccatcagctctgcc

SEQ ID NO: 310616 - DNA, 25 bp, Probe Sequence
tttatgatgactcagtggtgccaga

SEQ ID NO: 310617 - DNA, 25 bp, Probe Sequence
tttaatggccattgtgtctgacaga

SEQ ID NO: 310618 - DNA, 25 bp, Probe Sequence
tttatatgccgctgctttgaaagag

SEQ ID NO: 310619 - DNA, 25 bp, Probe Sequence
tttatatctgcctgcatttgtgaaa

SEQ ID NO: 310620 - DNA, 25 bp, Probe Sequence
tttatctgtgacttcatgctctgat

SEQ ID NO: 310621 - DNA, 25 bp, Probe Sequence
tttagctggatcttactcatagtaa

SEQ ID NO: 310622 - DNA, 25 bp, Probe Sequence
tttagcttgacacacagtagatgca

SEQ ID NO: 310623 - DNA, 25 bp, Probe Sequence
tttagcttcacacatgaaattgaga

SEQ ID NO: 310624 - DNA, 25 bp, Probe Sequence
tttagttaatccacaatctatagaa

SEQ ID NO: 310625 - DNA, 25 bp, Probe Sequence
ttgtaaataacaacccatatggaaa

SEQ ID NO: 310626 - DNA, 25 bp, Probe Sequence
tttatgaaacgtaccactatggata

SEQ ID NO: 310627 - DNA, 25 bp, Probe Sequence
tttactgacacttacatacttggac

SEQ ID NO: 310628 - DNA, 25 bp, Probe Sequence
tttagtccacatggcctcctgtgga

SEQ ID NO: 310629 - DNA, 25 bp, Probe Sequence
tttagactctctgtattgcttggta

SEQ ID NO: 310630 - DNA, 25 bp, Probe Sequence
tttatcctatgtggtttctccttag

SEQ ID NO: 310631 - DNA, 25 bp, Probe Sequence
tttagactgcaagtgttattcacac

SEQ ID NO: 310632 - DNA, 25 bp, Probe Sequence
tttaacagcatctgcttcattcccc

SEQ ID NO: 310633 - DNA, 25 bp, Probe Sequence
tttaacagcatctgcttcattcccc

SEQ ID NO: 310634 - DNA, 25 bp, Probe Sequence
tttaccactaagacttctgactcca

SEQ ID NO: 310635 - DNA, 25 bp, Probe Sequence
tttagtatctgaaggtttgagtcaa

SEQ ID NO: 310636 - DNA, 25 bp, Probe Sequence
tttacaatgtgcagtctttgattat

SEQ ID NO: 310637 - DNA, 25 bp, Probe Sequence
tttcaacactcttacacctgttatg

SEQ ID NO: 310638 - DNA, 25 bp, Probe Sequence
tttaccttcatttcatcctgttggc

SEQ ID NO: 310639 - DNA, 25 bp, Probe Sequence
tttactgtaatttcacatctggtgg

SEQ ID NO: 310640 - DNA, 25 bp, Probe Sequence
tttacatgtatactcctttggctgc

SEQ ID NO: 310641 - DNA, 25 bp, Probe Sequence
tttacatgattttgcctattgtgat

SEQ ID NO: 310642 - DNA, 25 bp, Probe Sequence
tttaaatgcgttcctcatccatgca

SEQ ID NO: 310643 - DNA, 25 bp, Probe Sequence
tttacggcaatatcatcaccacacg

SEQ ID NO: 310644 - DNA, 25 bp, Probe Sequence
tttacaccctggtcatcactgacaa

SEQ ID NO: 310645 - DNA, 25 bp, Probe Sequence
tttaattccataatcaatctatcaa

SEQ ID NO: 310646 - DNA, 25 bp, Probe Sequence
tttaatacccaatttcttccataat

SEQ ID NO: 310647 - DNA, 25 bp, Probe Sequence
tttactttctcaaattcttgccatg

SEQ ID NO: 310648 - DNA, 25 bp, Probe Sequence
tttatttctcaacagacattccagt

SEQ ID NO: 310649 - DNA, 25 bp, Probe Sequence
tttttcctcattgcaaactcctatt

SEQ ID NO: 310650 - DNA, 25 bp, Probe Sequence
ttattgccaatcaggacaaggcctt

SEQ ID NO: 310651 - DNA, 25 bp, Probe Sequence
ttagctccaagcggaccggtggttc

SEQ ID NO: 310652 - DNA, 25 bp, Probe Sequence
ttagcccagacaggactaaggggac

SEQ ID NO: 310653 - DNA, 25 bp, Probe Sequence
ttcgcccgacggaatccaggggtcg

SEQ ID NO: 310654 - DNA, 25 bp, Probe Sequence
tttcagcacgccgtaaccaggggct

SEQ ID NO: 310655 - DNA, 25 bp, Probe Sequence
tttacaagccgcaaaggcagcaggc

SEQ ID NO: 310656 - DNA, 25 bp, Probe Sequence
ttttcgatcagcccagaccagaggc

SEQ ID NO: 310657 - DNA, 25 bp, Probe Sequence
ttttcagctagagaactcactgagt

SEQ ID NO: 310658 - DNA, 25 bp, Probe Sequence
tttatgacatgaggttactcctagc

SEQ ID NO: 310659 - DNA, 25 bp, Probe Sequence
tttagcagacaggtgataactcaga

SEQ ID NO: 310660 - DNA, 25 bp, Probe Sequence
tttcactcacagtgtcactgtcaga

SEQ ID NO: 310661 - DNA, 25 bp, Probe Sequence
tttcactcaagagccactgagccgt

SEQ ID NO: 310662 - DNA, 25 bp, Probe Sequence
tttaccacacatgccagcatgtttt

SEQ ID NO: 310663 - DNA, 25 bp, Probe Sequence
tttagcccaaagtcagtgtctctgt

SEQ ID NO: 310664 - DNA, 25 bp, Probe Sequence
tttagcagaagaagacagtctttta

SEQ ID NO: 310665 - DNA, 25 bp, Probe Sequence
tttactaaacaatgcctgttacaaa

SEQ ID NO: 310666 - DNA, 25 bp, Probe Sequence
tttaaatacatcgtgacctgtgtaa

SEQ ID NO: 310667 - DNA, 25 bp, Probe Sequence
tttaagccaccaagtctctggtaac

SEQ ID NO: 310668 - DNA, 25 bp, Probe Sequence
tttaaccatctcaagattctgtcta

SEQ ID NO: 310669 - DNA, 25 bp, Probe Sequence
tttatagcaaatagagactcgttat

SEQ ID NO: 310670 - DNA, 25 bp, Probe Sequence
tttatactaaatgggctccttcatg

SEQ ID NO: 310671 - DNA, 25 bp, Probe Sequence
tttcatagttaaattgccatcttga

SEQ ID NO: 310672 - DNA, 25 bp, Probe Sequence
tttcatttttttacgtcttgcctat

SEQ ID NO: 310673 - DNA, 25 bp, Probe Sequence
tttcatttttttgtgaccccacaga

SEQ ID NO: 310674 - DNA, 25 bp, Probe Sequence
tttcaggtttttgtactccagcata

SEQ ID NO: 310675 - DNA, 25 bp, Probe Sequence
tttcaagtgcgttctttagaccaat

SEQ ID NO: 310676 - DNA, 25 bp, Probe Sequence
tttcttgtcgcttcctatcaaaata

SEQ ID NO: 310677 - DNA, 25 bp, Probe Sequence
tttcagtgtctgtcatacattaaaa

SEQ ID NO: 310678 - DNA, 25 bp, Probe Sequence
tttcagctcctgctacactacaaga

SEQ ID NO: 310679 - DNA, 25 bp, Probe Sequence
tttcagtcccagaacctacagatac

SEQ ID NO: 310680 - DNA, 25 bp, Probe Sequence
tttaacatccagcactgtaagaagc

SEQ ID NO: 310681 - DNA, 25 bp, Probe Sequence
tttaaagccatgcagctggaggggc

SEQ ID NO: 310682 - DNA, 25 bp, Probe Sequence
tttaatcctctgcctgctgatggag

SEQ ID NO: 310683 - DNA, 25 bp, Probe Sequence
tttaatctctcgactgaatggactt

SEQ ID NO: 310684 - DNA, 25 bp, Probe Sequence
ttttatcatcacccgactggtcatc

SEQ ID NO: 310685 - DNA, 25 bp, Probe Sequence
ttttgaaatcccatcaggtcaccgc

SEQ ID NO: 310686 - DNA, 25 bp, Probe Sequence
tttagtgaccccatgacttacagcc

SEQ ID NO: 310687 - DNA, 25 bp, Probe Sequence
tttttccctgtatgacattaagcct

SEQ ID NO: 310688 - DNA, 25 bp, Probe Sequence
ttttttgccttagccagtgtacctc

SEQ ID NO: 310689 - DNA, 25 bp, Probe Sequence
ttttactttctacaacagctgacct

SEQ ID NO: 310690 - DNA, 25 bp, Probe Sequence
ttttaatggccttcgaacagaactt

SEQ ID NO: 310691 - DNA, 25 bp, Probe Sequence
ttttaagtcctacatacaagtctaa

SEQ ID NO: 310692 - DNA, 25 bp, Probe Sequence
tttttttcccaaaacatcgtctcag

SEQ ID NO: 310693 - DNA, 25 bp, Probe Sequence
tttaattttccaacataatggatta

SEQ ID NO: 310694 - DNA, 25 bp, Probe Sequence
tttaatagtcattccaaatatgaga

SEQ ID NO: 310695 - DNA, 25 bp, Probe Sequence
tttaatagtcattccaaatatgaga

SEQ ID NO: 310696 - DNA, 25 bp, Probe Sequence
tttataagttacccatgaagtgata

SEQ ID NO: 310697 - DNA, 25 bp, Probe Sequence
tttaatgctgatctactataaggta

SEQ ID NO: 310698 - DNA, 25 bp, Probe Sequence
tttaatgtaatggagcttatgggta

SEQ ID NO: 310699 - DNA, 25 bp, Probe Sequence
tttcactgtaatggctgctacagag

SEQ ID NO: 310700 - DNA, 25 bp, Probe Sequence
tttcatcatgtctatagttcctgag

SEQ ID NO: 310701 - DNA, 25 bp, Probe Sequence
tttacagtccgactctcctgatgta

SEQ ID NO: 310702 - DNA, 25 bp, Probe Sequence
tttagtgggccacttctctgatgtc

SEQ ID NO: 310703 - DNA, 25 bp, Probe Sequence
tttatagggcgcctgtcacgtgtga

SEQ ID NO: 310704 - DNA, 25 bp, Probe Sequence
tttaagcaggcgtttatttctgcag

SEQ ID NO: 310705 - DNA, 25 bp, Probe Sequence
ttctaaaagcgcctttatttcagca

SEQ ID NO: 310706 - DNA, 25 bp, Probe Sequence
ttctaacctccctgttcttatgaat

SEQ ID NO: 310707 - DNA, 25 bp, Probe Sequence
ttctaacctccctgttcttatgaat

SEQ ID NO: 310708 - DNA, 25 bp, Probe Sequence
ttctaacctccctgttcttatgaat

SEQ ID NO: 310709 - DNA, 25 bp, Probe Sequence
tttcaccctttctactttgtcagaa

SEQ ID NO: 310710 - DNA, 25 bp, Probe Sequence
tttcatgccctcacataccattaaa

SEQ ID NO: 310711 - DNA, 25 bp, Probe Sequence
tttatccacatcagtatcatcaaag

SEQ ID NO: 310712 - DNA, 25 bp, Probe Sequence
ttcgctctactatggagatcaacag

SEQ ID NO: 310713 - DNA, 25 bp, Probe Sequence
ttctttactcaaggataacacggcg

SEQ ID NO: 310714 - DNA, 25 bp, Probe Sequence
ttgtttgacgacgaaaacacagccc

SEQ ID NO: 310715 - DNA, 25 bp, Probe Sequence
ttatttcaccaccataaaacccttg

SEQ ID NO: 310716 - DNA, 25 bp, Probe Sequence
ttggattagccagaaaaagccttat

SEQ ID NO: 310717 - DNA, 25 bp, Probe Sequence
tttcatgtcccagaacttagccttt

SEQ ID NO: 310718 - DNA, 25 bp, Probe Sequence
tttcatgttccagtagtcttgtaat

SEQ ID NO: 310719 - DNA, 25 bp, Probe Sequence
tttatgatatcaaagactcattgct

SEQ ID NO: 310720 - DNA, 25 bp, Probe Sequence
tttatgtcaatgtcgcactcttcac

SEQ ID NO: 310721 - DNA, 25 bp, Probe Sequence
tttatatgcaatgccactgcatcca

SEQ ID NO: 310722 - DNA, 25 bp, Probe Sequence
ttttatgatgtgcctacatgcatat

SEQ ID NO: 310723 - DNA, 25 bp, Probe Sequence
tttattgagtaccaagccatgtaat

SEQ ID NO: 310724 - DNA, 25 bp, Probe Sequence
tttacagactccctaccatgaaaca

SEQ ID NO: 310725 - DNA, 25 bp, Probe Sequence
tttaccctcaagtaccactaacaca

SEQ ID NO: 310726 - DNA, 25 bp, Probe Sequence
tttattttctagtaccagcctagga

SEQ ID NO: 310727 - DNA, 25 bp, Probe Sequence
ttttttccaagcaacctcactgaaa

SEQ ID NO: 310728 - DNA, 25 bp, Probe Sequence
ttttttcataactgcagtccttcaa

SEQ ID NO: 310729 - DNA, 25 bp, Probe Sequence
tttttctattaatcttttgtcaact

SEQ ID NO: 310730 - DNA, 25 bp, Probe Sequence
ttttgtcacacttatcctttgtctc

SEQ ID NO: 310731 - DNA, 25 bp, Probe Sequence
ttgttctgaactttcctgttacctt

SEQ ID NO: 310732 - DNA, 25 bp, Probe Sequence
tttttacgtcttgcctataagctaa

SEQ ID NO: 310733 - DNA, 25 bp, Probe Sequence
tttttcacgtaagtccacatatact

SEQ ID NO: 310734 - DNA, 25 bp, Probe Sequence
tttatagcactaaatgcccacaaga

SEQ ID NO: 310735 - DNA, 25 bp, Probe Sequence
tttagctgcactatgtgccccaata

SEQ ID NO: 310736 - DNA, 25 bp, Probe Sequence
tttatgatgcactgattccatccca

SEQ ID NO: 310737 - DNA, 25 bp, Probe Sequence
tttagtgacacatttccatcctatt

SEQ ID NO: 310738 - DNA, 25 bp, Probe Sequence
tttactgccattgtcgacctattgt

SEQ ID NO: 310739 - DNA, 25 bp, Probe Sequence
tttcactgacgtgatcagacactta

SEQ ID NO: 310740 - DNA, 25 bp, Probe Sequence
tttacagacctatcggccttatttc

SEQ ID NO: 310741 - DNA, 25 bp, Probe Sequence
ttttagccctaatgaccttttggat

SEQ ID NO: 310742 - DNA, 25 bp, Probe Sequence
ttcttaacccgtgagctctaattgg

SEQ ID NO: 310743 - DNA, 25 bp, Probe Sequence
tttaaaccctgtctccatgacttca

SEQ ID NO: 310744 - DNA, 25 bp, Probe Sequence
tttaaaactctcgattgccgtttca

SEQ ID NO: 310745 - DNA, 25 bp, Probe Sequence
tttacatcacatccattgatctgcc

SEQ ID NO: 310746 - DNA, 25 bp, Probe Sequence
tttatccatcatccaagaccatcca

SEQ ID NO: 310747 - DNA, 25 bp, Probe Sequence
tttatgttgatgccactgaagatcc

SEQ ID NO: 310748 - DNA, 25 bp, Probe Sequence
tttattgtcacccaaagatgcctat

SEQ ID NO: 310749 - DNA, 25 bp, Probe Sequence
ttcttgtagacaaaaaggcctatgc

SEQ ID NO: 310750 - DNA, 25 bp, Probe Sequence
tttttgaatcatactacggactaga

SEQ ID NO: 310751 - DNA, 25 bp, Probe Sequence
tttttcaacaagcacgaccatggat

SEQ ID NO: 310752 - DNA, 25 bp, Probe Sequence
tttttaaaacacccacctgcatgta

SEQ ID NO: 310753 - DNA, 25 bp, Probe Sequence
tttattaaagaatcaccaactgtaa

SEQ ID NO: 310754 - DNA, 25 bp, Probe Sequence
tttttaatataaatgcggagacgta

SEQ ID NO: 310755 - DNA, 25 bp, Probe Sequence
ttgtcttatttaaatggttacccat

SEQ ID NO: 310756 - DNA, 25 bp, Probe Sequence
tttttcattgtttgacgtttccact

SEQ ID NO: 310757 - DNA, 25 bp, Probe Sequence
tttttcactaaagctgtttgccctc

SEQ ID NO: 310758 - DNA, 25 bp, Probe Sequence
tttatctagaaaggtcgttcccagc

SEQ ID NO: 310759 - DNA, 25 bp, Probe Sequence
tttattataatatctggttccaggc

SEQ ID NO: 310760 - DNA, 25 bp, Probe Sequence
tttattttcaatatgcaagttaggc

SEQ ID NO: 310761 - DNA, 25 bp, Probe Sequence
tttactgtttataataggtggagac

SEQ ID NO: 310762 - DNA, 25 bp, Probe Sequence
tttttgtttgttccagggtaagcat

SEQ ID NO: 310763 - DNA, 25 bp, Probe Sequence
tttttgtgtttttccggcaagtgat

SEQ ID NO: 310764 - DNA, 25 bp, Probe Sequence
tttttggtttattctcaggagttgc

SEQ ID NO: 310765 - DNA, 25 bp, Probe Sequence
tttatatatgctttgtttcagggtt

SEQ ID NO: 310766 - DNA, 25 bp, Probe Sequence
ttggattatctgctattcgggtaat

SEQ ID NO: 310767 - DNA, 25 bp, Probe Sequence
tttattactggtttcataggtagat

SEQ ID NO: 310768 - DNA, 25 bp, Probe Sequence
ttttgtactggactttaccttgata

SEQ ID NO: 310769 - DNA, 25 bp, Probe Sequence
ttttctgtttacgtaacctgcttag

SEQ ID NO: 310770 - DNA, 25 bp, Probe Sequence
ttttggtttgaccgccacgatttag

SEQ ID NO: 310771 - DNA, 25 bp, Probe Sequence
tttttgtcattggcgtgcacacgtg

SEQ ID NO: 310772 - DNA, 25 bp, Probe Sequence
ttgtcttggcttccactacatgaag

SEQ ID NO: 310773 - DNA, 25 bp, Probe Sequence
tttttgagcttctcattgtgtagaa

SEQ ID NO: 310774 - DNA, 25 bp, Probe Sequence
tttttgccagtctcatgggtagata

SEQ ID NO: 310775 - DNA, 25 bp, Probe Sequence
tttttcatcttctctggcgacagtt

SEQ ID NO: 310776 - DNA, 25 bp, Probe Sequence
tttattttgtcatagggaggatttg

SEQ ID NO: 310777 - DNA, 25 bp, Probe Sequence
tttatttctttcaaggtggaatatt

SEQ ID NO: 310778 - DNA, 25 bp, Probe Sequence
ttttaggttttatgttgaatgttct

SEQ ID NO: 310779 - DNA, 25 bp, Probe Sequence
ttttggtttttgagtctcgttgtca

SEQ ID NO: 310780 - DNA, 25 bp, Probe Sequence
tttttttaatttatcctctgttgat

SEQ ID NO: 310781 - DNA, 25 bp, Probe Sequence
tttttttaatttatcctctgttgat

SEQ ID NO: 310782 - DNA, 25 bp, Probe Sequence
ttttacctaaatatgtctctttttg

SEQ ID NO: 310783 - DNA, 25 bp, Probe Sequence
tttttcacttgttaggaagcttttg

SEQ ID NO: 310784 - DNA, 25 bp, Probe Sequence
ttttcatagtaattaaaggcttatt

SEQ ID NO: 310785 - DNA, 25 bp, Probe Sequence
ttttaggttaactgagctgctttgt

SEQ ID NO: 310786 - DNA, 25 bp, Probe Sequence
ttttgggttaccgagagcttttgct

SEQ ID NO: 310787 - DNA, 25 bp, Probe Sequence
tttaggaaataccgatgcctttgtg

SEQ ID NO: 310788 - DNA, 25 bp, Probe Sequence
tttaggccaatatgggtgttctgtg

SEQ ID NO: 310789 - DNA, 25 bp, Probe Sequence
tttagaccaatgcattgcgtttctt

SEQ ID NO: 310790 - DNA, 25 bp, Probe Sequence
ttttaaaatcgctaggattctttga

SEQ ID NO: 310791 - DNA, 25 bp, Probe Sequence
tttatgggaaccttgtattttctgc

SEQ ID NO: 310792 - DNA, 25 bp, Probe Sequence
tttacagaaaccccatgctgttttc

SEQ ID NO: 310793 - DNA, 25 bp, Probe Sequence
tttaataatatcggccgctgtttgt

SEQ ID NO: 310794 - DNA, 25 bp, Probe Sequence
tttataaaatttgctctgtcttgtt

SEQ ID NO: 310795 - DNA, 25 bp, Probe Sequence
tttaaaatatttcagctgtcatttt

SEQ ID NO: 310796 - DNA, 25 bp, Probe Sequence
tttttacagtttcagctgtcagaaa

SEQ ID NO: 310797 - DNA, 25 bp, Probe Sequence
tttttagtggaaacgcgtcagaatc

SEQ ID NO: 310798 - DNA, 25 bp, Probe Sequence
tttttctgctggaaacagactcgat

SEQ ID NO: 310799 - DNA, 25 bp, Probe Sequence
tttagtctcgtgtgacatgatgtta

SEQ ID NO: 310800 - DNA, 25 bp, Probe Sequence
tttagcttctggtcagcactgatta

SEQ ID NO: 310801 - DNA, 25 bp, Probe Sequence
tttatattgataacagcactgacta

SEQ ID NO: 310802 - DNA, 25 bp, Probe Sequence
tttacagctgtaaatgcttacatta

SEQ ID NO: 310803 - DNA, 25 bp, Probe Sequence
tttagccctgatatgattactatga

SEQ ID NO: 310804 - DNA, 25 bp, Probe Sequence
tttcagctcctctgttggacatata

SEQ ID NO: 310805 - DNA, 25 bp, Probe Sequence
tttcagctaccagtttgcaatattt

SEQ ID NO: 310806 - DNA, 25 bp, Probe Sequence
tttagctacatattcttccttttaa

SEQ ID NO: 310807 - DNA, 25 bp, Probe Sequence
tttactccagaactctgttctttaa

SEQ ID NO: 310808 - DNA, 25 bp, Probe Sequence
tttcaccccaataatgttctatata

SEQ ID NO: 310809 - DNA, 25 bp, Probe Sequence
tttaccctactgatgatgtgttgtt

SEQ ID NO: 310810 - DNA, 25 bp, Probe Sequence
tttatcccatcgctttgattattgt

SEQ ID NO: 310811 - DNA, 25 bp, Probe Sequence
tttattcaatccatattttctctga

SEQ ID NO: 310812 - DNA, 25 bp, Probe Sequence
tttagtttacagtatatggattcta

SEQ ID NO: 310813 - DNA, 25 bp, Probe Sequence
ttctagattctatgacaggcgtttt

SEQ ID NO: 310814 - DNA, 25 bp, Probe Sequence
tttagatatcatttactggtgtttc

SEQ ID NO: 310815 - DNA, 25 bp, Probe Sequence
tttattatattttcagtttttccat

SEQ ID NO: 310816 - DNA, 25 bp, Probe Sequence
ttttttgacttctactttactggct

SEQ ID NO: 310817 - DNA, 25 bp, Probe Sequence
ttttttacttgctttcttactgaca

SEQ ID NO: 310818 - DNA, 25 bp, Probe Sequence
ttttttacttgctttcttactgaca

SEQ ID NO: 310819 - DNA, 25 bp, Probe Sequence
ttttttacttgctttcttactgaca

SEQ ID NO: 310820 - DNA, 25 bp, Probe Sequence
ttaggttttagtctttacatacaca

SEQ ID NO: 310821 - DNA, 25 bp, Probe Sequence
tttattttaaatctttacattcaga

SEQ ID NO: 310822 - DNA, 25 bp, Probe Sequence
tttttgttgaacagtttccgtacat

SEQ ID NO: 310823 - DNA, 25 bp, Probe Sequence
tttttctgtaccgctttggagtaca

SEQ ID NO: 310824 - DNA, 25 bp, Probe Sequence
tttattctgttagccttttggttga

SEQ ID NO: 310825 - DNA, 25 bp, Probe Sequence
tttttagctgttgaattttggaaat

SEQ ID NO: 310826 - DNA, 25 bp, Probe Sequence
tttattacttcccaatatttctaga

SEQ ID NO: 310827 - DNA, 25 bp, Probe Sequence
tttagatgcttctcaaaattttcag

SEQ ID NO: 310828 - DNA, 25 bp, Probe Sequence
tttagagctctgtacataatgttgt

SEQ ID NO: 310829 - DNA, 25 bp, Probe Sequence
tttacatgcctataatatgctggtt

SEQ ID NO: 310830 - DNA, 25 bp, Probe Sequence
tttacatactagtttatggcttctt

SEQ ID NO: 310831 - DNA, 25 bp, Probe Sequence
tttactgtcagtttcttgacatttt

SEQ ID NO: 310832 - DNA, 25 bp, Probe Sequence
tttacttcatctttaggacagagta

SEQ ID NO: 310833 - DNA, 25 bp, Probe Sequence
tttacattctgtttactgccacaag

SEQ ID NO: 310834 - DNA, 25 bp, Probe Sequence
tttcacatgggtttttctccaagtt

SEQ ID NO: 310835 - DNA, 25 bp, Probe Sequence
tttatcgggttgattgccgaagtga

SEQ ID NO: 310836 - DNA, 25 bp, Probe Sequence
tttagggttgtgactggctttggtg

SEQ ID NO: 310837 - DNA, 25 bp, Probe Sequence
tttagcacgtttaaagttctgtgta

SEQ ID NO: 310838 - DNA, 25 bp, Probe Sequence
tttaccatgttttccagtctgttta

SEQ ID NO: 310839 - DNA, 25 bp, Probe Sequence
tttcaacgttcttttgtcttttgct

SEQ ID NO: 310840 - DNA, 25 bp, Probe Sequence
tttcaacgcttaaaggtgtcttcct

SEQ ID NO: 310841 - DNA, 25 bp, Probe Sequence
tttacgcctgtaaatgtattcattc

SEQ ID NO: 310842 - DNA, 25 bp, Probe Sequence
tttacgccgctttctgacactttca

SEQ ID NO: 310843 - DNA, 25 bp, Probe Sequence
tttacaagtttgttgacccctcaag

SEQ ID NO: 310844 - DNA, 25 bp, Probe Sequence
tttataagttttgacccgcagagtg

SEQ ID NO: 310845 - DNA, 25 bp, Probe Sequence
ttaaacaggttctgacccagccagt

SEQ ID NO: 310846 - DNA, 25 bp, Probe Sequence
ttaaagcaatgtttacccacagcgc

SEQ ID NO: 310847 - DNA, 25 bp, Probe Sequence
tttaggcatgtttaacatccagcac

SEQ ID NO: 310848 - DNA, 25 bp, Probe Sequence
ttgtgatgccatcaacaaccgagcc

SEQ ID NO: 310849 - DNA, 25 bp, Probe Sequence
tttagcctctgaatgataccactgg

SEQ ID NO: 310850 - DNA, 25 bp, Probe Sequence
ttctagcattcaaggtcccattcgg

SEQ ID NO: 310851 - DNA, 25 bp, Probe Sequence
tttacattcatcaatatccctcttg

SEQ ID NO: 310852 - DNA, 25 bp, Probe Sequence
tttaatatctccaacctgcttgtgc

SEQ ID NO: 310853 - DNA, 25 bp, Probe Sequence
tttaaaccacccagcctgtggcttt

SEQ ID NO: 310854 - DNA, 25 bp, Probe Sequence
tttaaaacacccacctgcatgtaat

SEQ ID NO: 310855 - DNA, 25 bp, Probe Sequence
tttaaaaatcacattctctgttcag

SEQ ID NO: 310856 - DNA, 25 bp, Probe Sequence
tttaaaatgttcatggactattcca

SEQ ID NO: 310857 - DNA, 25 bp, Probe Sequence
tttaaagaggctgtgtggccaacca

SEQ ID NO: 310858 - DNA, 25 bp, Probe Sequence
tttattcgacgatgcttggcctacc

SEQ ID NO: 310859 - DNA, 25 bp, Probe Sequence
tttattcgacgatgcttggcctacc

SEQ ID NO: 310860 - DNA, 25 bp, Probe Sequence
ttagttgggcgttgtgttttacaca

SEQ ID NO: 310861 - DNA, 25 bp, Probe Sequence
ttcgctgtggcctgcagtttttagg

SEQ ID NO: 310862 - DNA, 25 bp, Probe Sequence
tttttggccttgtattttctggata

SEQ ID NO: 310863 - DNA, 25 bp, Probe Sequence
tttttggcaccttatgtttaaatca

SEQ ID NO: 310864 - DNA, 25 bp, Probe Sequence
tttttgcccctatatgaaccacaca

SEQ ID NO: 310865 - DNA, 25 bp, Probe Sequence
tttttgttttgattggaaggcagat

SEQ ID NO: 310866 - DNA, 25 bp, Probe Sequence
tttagtgttttgctgaaatcctgtt

SEQ ID NO: 310867 - DNA, 25 bp, Probe Sequence
tttagttttgtccagaactcatttt

SEQ ID NO: 310868 - DNA, 25 bp, Probe Sequence
tttaattattgttatacacagcttt

SEQ ID NO: 310869 - DNA, 25 bp, Probe Sequence
tttaatctgttttaagcatctctta

SEQ ID NO: 310870 - DNA, 25 bp, Probe Sequence
ttttagctgtttcagtcaccagtga

SEQ ID NO: 310871 - DNA, 25 bp, Probe Sequence
ttttatctattttctctacggctta

SEQ ID NO: 310872 - DNA, 25 bp, Probe Sequence
tttatatgctttgacctactaactt

SEQ ID NO: 310873 - DNA, 25 bp, Probe Sequence
ttttgatcattaacccgagtacctt

SEQ ID NO: 310874 - DNA, 25 bp, Probe Sequence
tttttcattttccccttaggcatat

SEQ ID NO: 310875 - DNA, 25 bp, Probe Sequence
ttttttttatccttgctggggatga

SEQ ID NO: 310876 - DNA, 25 bp, Probe Sequence
tttttcattcaacattgtagggggc

SEQ ID NO: 310877 - DNA, 25 bp, Probe Sequence
ttttggaatctacatgtcttggggg

SEQ ID NO: 310878 - DNA, 25 bp, Probe Sequence
tttttggaatctacatgtcttgggg

SEQ ID NO: 310879 - DNA, 25 bp, Probe Sequence
tttttgagatcttactgcttgtcac

SEQ ID NO: 310880 - DNA, 25 bp, Probe Sequence
tttttgctgattcaggcttggcctg

SEQ ID NO: 310881 - DNA, 25 bp, Probe Sequence
tttttgagtcggagtctcgctctgt

SEQ ID NO: 310882 - DNA, 25 bp, Probe Sequence
tttttagatgggagtttctgcttga

SEQ ID NO: 310883 - DNA, 25 bp, Probe Sequence
ttgtttgagggtattatcttctggt

SEQ ID NO: 310884 - DNA, 25 bp, Probe Sequence
tttttgagggttttctttgcatgag

SEQ ID NO: 310885 - DNA, 25 bp, Probe Sequence
tttttgggtgtttgttttgagagag

SEQ ID NO: 310886 - DNA, 25 bp, Probe Sequence
tttttcgtgttttccacctgcagaa

SEQ ID NO: 310887 - DNA, 25 bp, Probe Sequence
ttttctagttataaccaccagccgt

SEQ ID NO: 310888 - DNA, 25 bp, Probe Sequence
tttacttttttgaccacgagccatg

SEQ ID NO: 310889 - DNA, 25 bp, Probe Sequence
tttacattattgatcctccagacct

SEQ ID NO: 310890 - DNA, 25 bp, Probe Sequence
tttactcttctgttagctctggact

SEQ ID NO: 310891 - DNA, 25 bp, Probe Sequence
tttacctgtgcaacaaatctgccct

SEQ ID NO: 310892 - DNA, 25 bp, Probe Sequence
tttacactgtatgcagatgtccctc

SEQ ID NO: 310893 - DNA, 25 bp, Probe Sequence
tttatccagtagccagcatgcgcca

SEQ ID NO: 310894 - DNA, 25 bp, Probe Sequence
tttactactatgcagctgcccagac

SEQ ID NO: 310895 - DNA, 25 bp, Probe Sequence
tttatttcgaggtctgaatcagcag

SEQ ID NO: 310896 - DNA, 25 bp, Probe Sequence
tttatttctgcagggctgaaagcac

SEQ ID NO: 310897 - DNA, 25 bp, Probe Sequence
tttatgcattagtctggtgatttca

SEQ ID NO: 310898 - DNA, 25 bp, Probe Sequence
tttatatatgcactttgctgtttga

SEQ ID NO: 310899 - DNA, 25 bp, Probe Sequence
tttatcattcattttcgatgcctgc

SEQ ID NO: 310900 - DNA, 25 bp, Probe Sequence
tttatcttctgtagagctagccgcc

SEQ ID NO: 310901 - DNA, 25 bp, Probe Sequence
tttatcttctgtagagctagccgcc

SEQ ID NO: 310902 - DNA, 25 bp, Probe Sequence
tttttctattgctaggagcctgcca

SEQ ID NO: 310903 - DNA, 25 bp, Probe Sequence
tttttgtaagtatcacctgccacca

SEQ ID NO: 310904 - DNA, 25 bp, Probe Sequence
tttaattaagctaagcccttactag

SEQ ID NO: 310905 - DNA, 25 bp, Probe Sequence
ttttattagagctcgccacgaacta

SEQ ID NO: 310906 - DNA, 25 bp, Probe Sequence
tttttcgagacagcctacggcaccc

SEQ ID NO: 310907 - DNA, 25 bp, Probe Sequence
ttttatccacaaaggtagcggccac

SEQ ID NO: 310908 - DNA, 25 bp, Probe Sequence
ttttccggagggcgagctgagccct

SEQ ID NO: 310909 - DNA, 25 bp, Probe Sequence
ttacttccgagggcggggactaatg

SEQ ID NO: 310910 - DNA, 25 bp, Probe Sequence
ttaattcctcagtgggtgtgacata

SEQ ID NO: 310911 - DNA, 25 bp, Probe Sequence
tttagtcaccagtgcctatggatca

SEQ ID NO: 310912 - DNA, 25 bp, Probe Sequence
tttatggagcgcgaccctgatgaac

SEQ ID NO: 310913 - DNA, 25 bp, Probe Sequence
ttattggcagtgggccctggaggcc

SEQ ID NO: 310914 - DNA, 25 bp, Probe Sequence
ttattggcagtgggccctggaggcc

SEQ ID NO: 310915 - DNA, 25 bp, Probe Sequence
ttttgccaggcatcctcatggaagt

SEQ ID NO: 310916 - DNA, 25 bp, Probe Sequence
ttttcctgcaatagcctgggaagga

SEQ ID NO: 310917 - DNA, 25 bp, Probe Sequence
ttttgcgctcgaggttatggaacag

SEQ ID NO: 310918 - DNA, 25 bp, Probe Sequence
tttaggagagcaccttcatggagaa

SEQ ID NO: 310919 - DNA, 25 bp, Probe Sequence
tttagaagacagacccattgattca

SEQ ID NO: 310920 - DNA, 25 bp, Probe Sequence
tttaaggaatatctcttgatataga

SEQ ID NO: 310921 - DNA, 25 bp, Probe Sequence
tttatattgcagtatcctttaaaag

SEQ ID NO: 310922 - DNA, 25 bp, Probe Sequence
ttttgagtgcaactgccttccagaa

SEQ ID NO: 310923 - DNA, 25 bp, Probe Sequence
ttttgaggcagactctctgtcgcca

SEQ ID NO: 310924 - DNA, 25 bp, Probe Sequence
ttttagcatgcattgtttctgtgcc

SEQ ID NO: 310925 - DNA, 25 bp, Probe Sequence
tttaagctgtattctgccattgcct

SEQ ID NO: 310926 - DNA, 25 bp, Probe Sequence
tttaagctgatgaatctccaccgcc

SEQ ID NO: 310927 - DNA, 25 bp, Probe Sequence
tttacagatcagaatgtggcaccag

SEQ ID NO: 310928 - DNA, 25 bp, Probe Sequence
ttttcgatcagcatatgcagcctcc

SEQ ID NO: 310929 - DNA, 25 bp, Probe Sequence
tttttgtacatttgagccatgtcac

SEQ ID NO: 310930 - DNA, 25 bp, Probe Sequence
tttatttcctgcataccattagaag

SEQ ID NO: 310931 - DNA, 25 bp, Probe Sequence
ttatgcatttcagcaaagtcattgg

SEQ ID NO: 310932 - DNA, 25 bp, Probe Sequence
ttatatatctcatacagatttggcc

SEQ ID NO: 310933 - DNA, 25 bp, Probe Sequence
tttatacttcccaaattatgccacc

SEQ ID NO: 310934 - DNA, 25 bp, Probe Sequence
tttaactatccagtcaactttcagc

SEQ ID NO: 310935 - DNA, 25 bp, Probe Sequence
tttaactttaactatgcctatcgcc

SEQ ID NO: 310936 - DNA, 25 bp, Probe Sequence
tttagaatcattaccttttaccagc

SEQ ID NO: 310937 - DNA, 25 bp, Probe Sequence
tttagagatatttcagccctttcct

SEQ ID NO: 310938 - DNA, 25 bp, Probe Sequence
tttagattattccaagccttatttt

SEQ ID NO: 310939 - DNA, 25 bp, Probe Sequence
ttataacgttctcagtcctttgtta

SEQ ID NO: 310940 - DNA, 25 bp, Probe Sequence
ttttaggtttaagtcctgtctgtct

SEQ ID NO: 310941 - DNA, 25 bp, Probe Sequence
tttatatggctttttttcttcgaca

SEQ ID NO: 310942 - DNA, 25 bp, Probe Sequence
tttatatctggttctatattttaaa

SEQ ID NO: 310943 - DNA, 25 bp, Probe Sequence
tttatctcctgtctacagtttaata

SEQ ID NO: 310944 - DNA, 25 bp, Probe Sequence
ttttgtcacttgttgagggtgtaca

SEQ ID NO: 310945 - DNA, 25 bp, Probe Sequence
ttatttatgattctggggggaaaat

SEQ ID NO: 310946 - DNA, 25 bp, Probe Sequence
ttattctaactcagggatggaaaac

SEQ ID NO: 310947 - DNA, 25 bp, Probe Sequence
ttttcaaactctcccgagtaaatag

SEQ ID NO: 310948 - DNA, 25 bp, Probe Sequence
ttttcaaaccaaattgggagaattg

SEQ ID NO: 310949 - DNA, 25 bp, Probe Sequence
tttacaaaccctatgcccagaatca

SEQ ID NO: 310950 - DNA, 25 bp, Probe Sequence
tttatctcagacatctgccccaaga

SEQ ID NO: 310951 - DNA, 25 bp, Probe Sequence
tttactctctgattctgggccaaga

SEQ ID NO: 310952 - DNA, 25 bp, Probe Sequence
tttactgcctgtagcaatggccaga

SEQ ID NO: 310953 - DNA, 25 bp, Probe Sequence
tttaaggctgtagcttgccgatgct

SEQ ID NO: 310954 - DNA, 25 bp, Probe Sequence
tttatcagcctcatgcctgaatcaa

SEQ ID NO: 310955 - DNA, 25 bp, Probe Sequence
tttaacctcctaagtatcaagtata

SEQ ID NO: 310956 - DNA, 25 bp, Probe Sequence
tttaaccttctaatttgccacttat

SEQ ID NO: 310957 - DNA, 25 bp, Probe Sequence
tttataacacctaatttgtcatttt

SEQ ID NO: 310958 - DNA, 25 bp, Probe Sequence
tttattaacctcagcatttactttg

SEQ ID NO: 310959 - DNA, 25 bp, Probe Sequence
tttttgtcccctagattgagttttg

SEQ ID NO: 310960 - DNA, 25 bp, Probe Sequence
ttttttcccctcatagatagcttct

SEQ ID NO: 310961 - DNA, 25 bp, Probe Sequence
tttttctcctttatatgactttctc

SEQ ID NO: 310962 - DNA, 25 bp, Probe Sequence
tttttcatgctctttagtaacttac

SEQ ID NO: 310963 - DNA, 25 bp, Probe Sequence
ttattctatggtaaattcacactaa

SEQ ID NO: 310964 - DNA, 25 bp, Probe Sequence
ttatacttgagtagacaactttaat

SEQ ID NO: 310965 - DNA, 25 bp, Probe Sequence
tttagtttaaaatcttgcatggcat

SEQ ID NO: 310966 - DNA, 25 bp, Probe Sequence
tttagatctttgaaaacccaggact

SEQ ID NO: 310967 - DNA, 25 bp, Probe Sequence
tttactcttttgatggcccaggaca

SEQ ID NO: 310968 - DNA, 25 bp, Probe Sequence
tttagcaattttcttccttgtgaac

SEQ ID NO: 310969 - DNA, 25 bp, Probe Sequence
tttagattttcttttgccttttgca

SEQ ID NO: 310970 - DNA, 25 bp, Probe Sequence
tttacagttctttgatttcgtttca

SEQ ID NO: 310971 - DNA, 25 bp, Probe Sequence
tttacatgatattttgatagtagat

SEQ ID NO: 310972 - DNA, 25 bp, Probe Sequence
tttagccatcattatatgtttaagt

SEQ ID NO: 310973 - DNA, 25 bp, Probe Sequence
tttatactattatttgttacgttca

SEQ ID NO: 310974 - DNA, 25 bp, Probe Sequence
ttttaggacatcttttgataccttt

SEQ ID NO: 310975 - DNA, 25 bp, Probe Sequence
ttttctgaatcataattaaacttta

SEQ ID NO: 310976 - DNA, 25 bp, Probe Sequence
tttttagactaatatacaacttcac

SEQ ID NO: 310977 - DNA, 25 bp, Probe Sequence
tttttacctaaatatcagtctccac

SEQ ID NO: 310978 - DNA, 25 bp, Probe Sequence
ttttcaacccagaatttcttatcca

SEQ ID NO: 310979 - DNA, 25 bp, Probe Sequence
ttttatacccttgtgtctgtgtaca

SEQ ID NO: 310980 - DNA, 25 bp, Probe Sequence
tttaaacccactgggtcctgccaca

SEQ ID NO: 310981 - DNA, 25 bp, Probe Sequence
tttaaaaaactcctgtcttgctaga

SEQ ID NO: 310982 - DNA, 25 bp, Probe Sequence
tttaccaaaaacatcacctctagca

SEQ ID NO: 310983 - DNA, 25 bp, Probe Sequence
tttactataaatttcatccaactac

SEQ ID NO: 310984 - DNA, 25 bp, Probe Sequence
tttactgatatatttgctctctaca

SEQ ID NO: 310985 - DNA, 25 bp, Probe Sequence
tttatttaatatacctgcttcagcc

SEQ ID NO: 310986 - DNA, 25 bp, Probe Sequence
tttatttgaataattatgtgctgaa

SEQ ID NO: 310987 - DNA, 25 bp, Probe Sequence
tttttctgaatcataattaaacttt

SEQ ID NO: 310988 - DNA, 25 bp, Probe Sequence
tttttcatacttatttaaatctctt

SEQ ID NO: 310989 - DNA, 25 bp, Probe Sequence
tttatgtattccaacctttaactct

SEQ ID NO: 310990 - DNA, 25 bp, Probe Sequence
tttatgtttccaaccctcttgaatt

SEQ ID NO: 310991 - DNA, 25 bp, Probe Sequence
ttttgtttccaatgaccttgaaatg

SEQ ID NO: 310992 - DNA, 25 bp, Probe Sequence
tttttgttactgtaggtcttcaaag

SEQ ID NO: 310993 - DNA, 25 bp, Probe Sequence
tttttcataactgcagtccttcaaa

SEQ ID NO: 310994 - DNA, 25 bp, Probe Sequence
tttttacaaccctctgactcaacaa

SEQ ID NO: 310995 - DNA, 25 bp, Probe Sequence
ttttctgaaacggcgaggaccacca

SEQ ID NO: 310996 - DNA, 25 bp, Probe Sequence
ttctctctgaagtctaggttaccca

SEQ ID NO: 310997 - DNA, 25 bp, Probe Sequence
ttcttcaaggtgacaggtctaaaga

SEQ ID NO: 310998 - DNA, 25 bp, Probe Sequence
ttttcaagttttggtcttcagagac

SEQ ID NO: 310999 - DNA, 25 bp, Probe Sequence
tttatgcaatttactgactttaagg

SEQ ID NO: 311000 - DNA, 25 bp, Probe Sequence
ttttgaattcttcctgcttgttcag

SEQ ID NO: 311001 - DNA, 25 bp, Probe Sequence
tttagtggccttcatgttattcaga

SEQ ID NO: 311002 - DNA, 25 bp, Probe Sequence
tttatggtacttcattgctcttcct

SEQ ID NO: 311003 - DNA, 25 bp, Probe Sequence
tttagtttttcgttctatgtccata

SEQ ID NO: 311004 - DNA, 25 bp, Probe Sequence
tttacttcttctctttatatgtcta

SEQ ID NO: 311005 - DNA, 25 bp, Probe Sequence
tttagcttatttcttgtaccttgca

SEQ ID NO: 311006 - DNA, 25 bp, Probe Sequence
tttacttcaagtctttgtgcctctg

SEQ ID NO: 311007 - DNA, 25 bp, Probe Sequence
ttatacttctgacctttgggctttc

SEQ ID NO: 311008 - DNA, 25 bp, Probe Sequence
ttatacttctgagctgctaccacat

SEQ ID NO: 311009 - DNA, 25 bp, Probe Sequence
tttactttgagctttgaacactgaa

SEQ ID NO: 311010 - DNA, 25 bp, Probe Sequence
tttacattttctggtactctgtgaa

SEQ ID NO: 311011 - DNA, 25 bp, Probe Sequence
tttatatttattgtgcttcgagtga

SEQ ID NO: 311012 - DNA, 25 bp, Probe Sequence
ttttattatttggatgtatatcagt

SEQ ID NO: 311013 - DNA, 25 bp, Probe Sequence
tttattatttggatgtatatcagtg

SEQ ID NO: 311014 - DNA, 25 bp, Probe Sequence
tttattctcttaagggatacacgag

SEQ ID NO: 311015 - DNA, 25 bp, Probe Sequence
ttctctgtacgcccagggaaagcgg

SEQ ID NO: 311016 - DNA, 25 bp, Probe Sequence
ttcttaaccctcaggcaaacctgtg

SEQ ID NO: 311017 - DNA, 25 bp, Probe Sequence
tttttagtcgtcatggagaaggtgg

SEQ ID NO: 311018 - DNA, 25 bp, Probe Sequence
tttttagctcccccaaacaagtgag

SEQ ID NO: 311019 - DNA, 25 bp, Probe Sequence
tttttagcctcccctacaatggaat

SEQ ID NO: 311020 - DNA, 25 bp, Probe Sequence
tttattccctcctctaaatgctata

SEQ ID NO: 311021 - DNA, 25 bp, Probe Sequence
ttctattcccttcttccaaatatga

SEQ ID NO: 311022 - DNA, 25 bp, Probe Sequence
tttttactttcaattgcctagcaca

SEQ ID NO: 311023 - DNA, 25 bp, Probe Sequence
tttttattttcatatccagcctaaa

SEQ ID NO: 311024 - DNA, 25 bp, Probe Sequence
tttttaatacctgtgccattctcaa

SEQ ID NO: 311025 - DNA, 25 bp, Probe Sequence
tttttaatccccttcatcggatcac

SEQ ID NO: 311026 - DNA, 25 bp, Probe Sequence
tttttaatgtcatattcatctggta

SEQ ID NO: 311027 - DNA, 25 bp, Probe Sequence
tttttaagatggcatgtgctttgaa

SEQ ID NO: 311028 - DNA, 25 bp, Probe Sequence
tttttaagaagttgatgtgcttgtt

SEQ ID NO: 311029 - DNA, 25 bp, Probe Sequence
tttttttgacacagagtcttgctct

SEQ ID NO: 311030 - DNA, 25 bp, Probe Sequence
tttttctggatatggagtatgtttt

SEQ ID NO: 311031 - DNA, 25 bp, Probe Sequence
tttttctttgacccagtttgcattt

SEQ ID NO: 311032 - DNA, 25 bp, Probe Sequence
ttttcactatagagcctttctactc

SEQ ID NO: 311033 - DNA, 25 bp, Probe Sequence
ttagtaaaaatccctcattccagcc

SEQ ID NO: 311034 - DNA, 25 bp, Probe Sequence
ttagtaaaaatccctcattccagcc

SEQ ID NO: 311035 - DNA, 25 bp, Probe Sequence
ttggacaaaaagacccacatccacc

SEQ ID NO: 311036 - DNA, 25 bp, Probe Sequence
tttacagataaagctgctaactcct

SEQ ID NO: 311037 - DNA, 25 bp, Probe Sequence
ttatctaacaaagggctaataccca

SEQ ID NO: 311038 - DNA, 25 bp, Probe Sequence
ttgctttgcgttagggtgaagaccc

SEQ ID NO: 311039 - DNA, 25 bp, Probe Sequence
tttttggcttaaagtgtacatcact

SEQ ID NO: 311040 - DNA, 25 bp, Probe Sequence
tttagtgcgtatgttctgtccaccc

SEQ ID NO: 311041 - DNA, 25 bp, Probe Sequence
tttagctgctttatcatctttaccc

SEQ ID NO: 311042 - DNA, 25 bp, Probe Sequence
ttttcctttgcaatccatttaaaca

SEQ ID NO: 311043 - DNA, 25 bp, Probe Sequence
ttttcccactttccaatgtactcaa

SEQ ID NO: 311044 - DNA, 25 bp, Probe Sequence
ttttcctaattaacaaggaccatct

SEQ ID NO: 311045 - DNA, 25 bp, Probe Sequence
ttttccctagtcagacaggcccaat

SEQ ID NO: 311046 - DNA, 25 bp, Probe Sequence
ttttgcacctaaatcgacgggactt

SEQ ID NO: 311047 - DNA, 25 bp, Probe Sequence
ttttgacccaactaaccttgactgt

SEQ ID NO: 311048 - DNA, 25 bp, Probe Sequence
tttaggcccaaaattagcgtgacac

SEQ ID NO: 311049 - DNA, 25 bp, Probe Sequence
ttgtaacaaacatttctgggtgaca

SEQ ID NO: 311050 - DNA, 25 bp, Probe Sequence
ttttactaggcttcctgcgtgtgta

SEQ ID NO: 311051 - DNA, 25 bp, Probe Sequence
tttttccaggcttctttgggttgat

SEQ ID NO: 311052 - DNA, 25 bp, Probe Sequence
tttttccatttagttgggcgttgtg

SEQ ID NO: 311053 - DNA, 25 bp, Probe Sequence
tttttcctttcagaggggctggtgc

SEQ ID NO: 311054 - DNA, 25 bp, Probe Sequence
tttttctcttgcttctaaggggtgg

SEQ ID NO: 311055 - DNA, 25 bp, Probe Sequence
tttttctcgctgtggcaacggggac

SEQ ID NO: 311056 - DNA, 25 bp, Probe Sequence
ttcttttgccttttgcaaccaggaa

SEQ ID NO: 311057 - DNA, 25 bp, Probe Sequence
tttttatcaccttctacatcctggt

SEQ ID NO: 311058 - DNA, 25 bp, Probe Sequence
tttttgtctcactgtagacctggac

SEQ ID NO: 311059 - DNA, 25 bp, Probe Sequence
ttttcatattcctgagaaactggac

SEQ ID NO: 311060 - DNA, 25 bp, Probe Sequence
ttttcgttcactgagacacactgaa

SEQ ID NO: 311061 - DNA, 25 bp, Probe Sequence
ttttcttaagatcctacagaatgaa

SEQ ID NO: 311062 - DNA, 25 bp, Probe Sequence
ttttttgtagtcaatccaactgtac

SEQ ID NO: 311063 - DNA, 25 bp, Probe Sequence
tttttttcagtcccagaacctacag

SEQ ID NO: 311064 - DNA, 25 bp, Probe Sequence
ttatttttctctgggaaaggtacag

SEQ ID NO: 311065 - DNA, 25 bp, Probe Sequence
ttttttttcatagtcaaagttagct

SEQ ID NO: 311066 - DNA, 25 bp, Probe Sequence
tttttcttaccattcaaagtacagg

SEQ ID NO: 311067 - DNA, 25 bp, Probe Sequence
ttttgtttaaagtgaactacagctg

SEQ ID NO: 311068 - DNA, 25 bp, Probe Sequence
tttttgtttaaagtgaactacagct

SEQ ID NO: 311069 - DNA, 25 bp, Probe Sequence
tttttcttgtgctgactaactataa

SEQ ID NO: 311070 - DNA, 25 bp, Probe Sequence
tttatttctgtttgtcgataagaaa

SEQ ID NO: 311071 - DNA, 25 bp, Probe Sequence
ttttttcagagaaggccttacagaa

SEQ ID NO: 311072 - DNA, 25 bp, Probe Sequence
tttattatataaagcccagtaaaga

SEQ ID NO: 311073 - DNA, 25 bp, Probe Sequence
ttttcttttaagcccagtacatata

SEQ ID NO: 311074 - DNA, 25 bp, Probe Sequence
ttttcagtcccagaacctacagata

SEQ ID NO: 311075 - DNA, 25 bp, Probe Sequence
tttttgtcccccaacttgagatgta

SEQ ID NO: 311076 - DNA, 25 bp, Probe Sequence
tttttgtcccccaacttgagatgta

SEQ ID NO: 311077 - DNA, 25 bp, Probe Sequence
ttatgggactttcctacttggcagt

SEQ ID NO: 311078 - DNA, 25 bp, Probe Sequence
ttatgggactttcctacttggcagt

SEQ ID NO: 311079 - DNA, 25 bp, Probe Sequence
ttttggccttttagacttggactga

SEQ ID NO: 311080 - DNA, 25 bp, Probe Sequence
tttatgaccttgttaccttagaaat

SEQ ID NO: 311081 - DNA, 25 bp, Probe Sequence
ttactgggtatacacctagagaaat

SEQ ID NO: 311082 - DNA, 25 bp, Probe Sequence
ttactcggactaccccgatgcatac

SEQ ID NO: 311083 - DNA, 25 bp, Probe Sequence
ttatctcaggagagagcccgctctt

SEQ ID NO: 311084 - DNA, 25 bp, Probe Sequence
ttttcatgaggatgaccccttcttc

SEQ ID NO: 311085 - DNA, 25 bp, Probe Sequence
ttttataagatattcccgctttctg

SEQ ID NO: 311086 - DNA, 25 bp, Probe Sequence
tttttagagaagtccctgattcctt

SEQ ID NO: 311087 - DNA, 25 bp, Probe Sequence
ttttctcaaactttcctgatcctgc

SEQ ID NO: 311088 - DNA, 25 bp, Probe Sequence
tttttcaacactcttacacctgtta

SEQ ID NO: 311089 - DNA, 25 bp, Probe Sequence
ttatttccaagcaggaccaccttta

SEQ ID NO: 311090 - DNA, 25 bp, Probe Sequence
ttgttttcaaagtgaccctatttca

SEQ ID NO: 311091 - DNA, 25 bp, Probe Sequence
ttttttccataagaattgtaaacat

SEQ ID NO: 311092 - DNA, 25 bp, Probe Sequence
ttttttctggaagtgatatatgtca

SEQ ID NO: 311093 - DNA, 25 bp, Probe Sequence
ttttttctggaagtgatatatgtca

SEQ ID NO: 311094 - DNA, 25 bp, Probe Sequence
tttttattggaactgcttactatcc

SEQ ID NO: 311095 - DNA, 25 bp, Probe Sequence
tttttgcatgtttttcttaattcca

SEQ ID NO: 311096 - DNA, 25 bp, Probe Sequence
tttttgcatgtttttcttaattcca

SEQ ID NO: 311097 - DNA, 25 bp, Probe Sequence
ttttagctgcttgttttaagtcctt

SEQ ID NO: 311098 - DNA, 25 bp, Probe Sequence
tttttctgattcttttttcagtcag

SEQ ID NO: 311099 - DNA, 25 bp, Probe Sequence
tttatccttgtaagtatcttcaaag

SEQ ID NO: 311100 - DNA, 25 bp, Probe Sequence
tttatccttgtgggtcagatttcag

SEQ ID NO: 311101 - DNA, 25 bp, Probe Sequence
tttatagctttggccagcaatttac

SEQ ID NO: 311102 - DNA, 25 bp, Probe Sequence
tttatatgcttgtgtaacaggaaca

SEQ ID NO: 311103 - DNA, 25 bp, Probe Sequence
tttattcaatgttgttgcacgagaa

SEQ ID NO: 311104 - DNA, 25 bp, Probe Sequence
tttataaatgcttcttaccaagaaa

SEQ ID NO: 311105 - DNA, 25 bp, Probe Sequence
ttttcccagcttttgagccaacaac

SEQ ID NO: 311106 - DNA, 25 bp, Probe Sequence
ttttctccctggtggcgaggaagct

SEQ ID NO: 311107 - DNA, 25 bp, Probe Sequence
tttttccccttgtgtgctgtcaagt

SEQ ID NO: 311108 - DNA, 25 bp, Probe Sequence
tttttcgctacctacgtgcagaaga

SEQ ID NO: 311109 - DNA, 25 bp, Probe Sequence
ttttctttatcgcccctgagaagat

SEQ ID NO: 311110 - DNA, 25 bp, Probe Sequence
ttttcttctgtcaccaaaagaggtc

SEQ ID NO: 311111 - DNA, 25 bp, Probe Sequence
ttttctattgtctcccaaagaattc

SEQ ID NO: 311112 - DNA, 25 bp, Probe Sequence
tttttttgatatttccagaaaactg

SEQ ID NO: 311113 - DNA, 25 bp, Probe Sequence
tttatttggggcttctcagaaatta

SEQ ID NO: 311114 - DNA, 25 bp, Probe Sequence
tttattctgggtcatctatagaagt

SEQ ID NO: 311115 - DNA, 25 bp, Probe Sequence
tttattctggaggatatctaatgtg

SEQ ID NO: 311116 - DNA, 25 bp, Probe Sequence
ttttgcggtgaaaacataatgatgc

SEQ ID NO: 311117 - DNA, 25 bp, Probe Sequence
tttactagctaaaacataatcacaa

SEQ ID NO: 311118 - DNA, 25 bp, Probe Sequence
ttttctgagaaagactattcaaaca

SEQ ID NO: 311119 - DNA, 25 bp, Probe Sequence
ttttatatgcaaagtttttcaacca

SEQ ID NO: 311120 - DNA, 25 bp, Probe Sequence
ttttttgctacgcaattctcgattc

SEQ ID NO: 311121 - DNA, 25 bp, Probe Sequence
tttttgagatacgtttattgtattc

SEQ ID NO: 311122 - DNA, 25 bp, Probe Sequence
tttactagtactttctatttcagcc

SEQ ID NO: 311123 - DNA, 25 bp, Probe Sequence
tttacttgtacaattcattgttact

SEQ ID NO: 311124 - DNA, 25 bp, Probe Sequence
ttttttgtagcaactattggatgat

SEQ ID NO: 311125 - DNA, 25 bp, Probe Sequence
tttactttacatttttggtgttgat

SEQ ID NO: 311126 - DNA, 25 bp, Probe Sequence
tttactcttagcaaactctagttta

SEQ ID NO: 311127 - DNA, 25 bp, Probe Sequence
ttttcctaactccatcttagtgtat

SEQ ID NO: 311128 - DNA, 25 bp, Probe Sequence
ttttgcccacctctgcaatagtgat

SEQ ID NO: 311129 - DNA, 25 bp, Probe Sequence
tttacctgcaccgttgactcagtat

SEQ ID NO: 311130 - DNA, 25 bp, Probe Sequence
tttacttccggaatactcaagcaaa

SEQ ID NO: 311131 - DNA, 25 bp, Probe Sequence
tttatccccaggaaatcttcagcaa

SEQ ID NO: 311132 - DNA, 25 bp, Probe Sequence
tttaccctcagaaagactctcttat

SEQ ID NO: 311133 - DNA, 25 bp, Probe Sequence
tttaccctcagaaagactctcttat

SEQ ID NO: 311134 - DNA, 25 bp, Probe Sequence
tttactccctaaacaacacttgaca

SEQ ID NO: 311135 - DNA, 25 bp, Probe Sequence
tttagctcccccaaacaagtgagaa

SEQ ID NO: 311136 - DNA, 25 bp, Probe Sequence
ttctaatcccagcattaaagtgaaa

SEQ ID NO: 311137 - DNA, 25 bp, Probe Sequence
tttttctccaagttaatacagaaat

SEQ ID NO: 311138 - DNA, 25 bp, Probe Sequence
ttttaccgccagatgaaatcgaaca

SEQ ID NO: 311139 - DNA, 25 bp, Probe Sequence
ttttcaccccagaggacacaggcag

SEQ ID NO: 311140 - DNA, 25 bp, Probe Sequence
ttttcaccccagaggacacaggcag

SEQ ID NO: 311141 - DNA, 25 bp, Probe Sequence
tttatgtcctctgtcgggacatgga

SEQ ID NO: 311142 - DNA, 25 bp, Probe Sequence
tttagaccctgggtgggctctgtgc

SEQ ID NO: 311143 - DNA, 25 bp, Probe Sequence
ttttgaaccttaatgagagtctgtc

SEQ ID NO: 311144 - DNA, 25 bp, Probe Sequence
tttttaccttgaacaactgcttgga

SEQ ID NO: 311145 - DNA, 25 bp, Probe Sequence
ttgtttaaagtgaactacagctgtg

SEQ ID NO: 311146 - DNA, 25 bp, Probe Sequence
ttttgtaaagcccttgcacagctgg

SEQ ID NO: 311147 - DNA, 25 bp, Probe Sequence
tttatgctgaaaaggtggccactag

SEQ ID NO: 311148 - DNA, 25 bp, Probe Sequence
ttgtcctgaagaagtggtacacgat

SEQ ID NO: 311149 - DNA, 25 bp, Probe Sequence
tttactcaagaactggaaaccaact

SEQ ID NO: 311150 - DNA, 25 bp, Probe Sequence
tttactcagaatttgcaaaaacttt

SEQ ID NO: 311151 - DNA, 25 bp, Probe Sequence
tttagctcaggctttcaccaacact

SEQ ID NO: 311152 - DNA, 25 bp, Probe Sequence
tttagccagtcgtgacatcaaccct

SEQ ID NO: 311153 - DNA, 25 bp, Probe Sequence
tttaccagtggctgaatctactttc

SEQ ID NO: 311154 - DNA, 25 bp, Probe Sequence
tttatcacgtttgaatctaccattc

SEQ ID NO: 311155 - DNA, 25 bp, Probe Sequence
tttaccagcttttaaccatctgata

SEQ ID NO: 311156 - DNA, 25 bp, Probe Sequence
tttaccttctaaaagtactgcattt

SEQ ID NO: 311157 - DNA, 25 bp, Probe Sequence
tttaccttctaaaagtactgcattt

SEQ ID NO: 311158 - DNA, 25 bp, Probe Sequence
tttacgccttcataattgcactgct

SEQ ID NO: 311159 - DNA, 25 bp, Probe Sequence
tttttacattcatcaatatccctct

SEQ ID NO: 311160 - DNA, 25 bp, Probe Sequence
ttttttcattcttatattttgccag

SEQ ID NO: 311161 - DNA, 25 bp, Probe Sequence
ttttgactgtacctttttctccagt

SEQ ID NO: 311162 - DNA, 25 bp, Probe Sequence
ttttacattacacttgtctgtctta

SEQ ID NO: 311163 - DNA, 25 bp, Probe Sequence
ttttcacattaggctgttggttcaa

SEQ ID NO: 311164 - DNA, 25 bp, Probe Sequence
tttagatcttatattggtttgcaca

SEQ ID NO: 311165 - DNA, 25 bp, Probe Sequence
tttagatctttccatttttctccat

SEQ ID NO: 311166 - DNA, 25 bp, Probe Sequence
tttatttttcactttgctacaccat

SEQ ID NO: 311167 - DNA, 25 bp, Probe Sequence
tttttttcaacactcttacacctgt

SEQ ID NO: 311168 - DNA, 25 bp, Probe Sequence
ttttttcaacactcttacacctgtt

SEQ ID NO: 311169 - DNA, 25 bp, Probe Sequence
ttttttatacactccatccctgtgt

SEQ ID NO: 311170 - DNA, 25 bp, Probe Sequence
tttatttgtgtagacctcgctcttg

SEQ ID NO: 311171 - DNA, 25 bp, Probe Sequence
tttttagtgttggaactgcctctta

SEQ ID NO: 311172 - DNA, 25 bp, Probe Sequence
ttttttgctgtacgcgttttttgag

SEQ ID NO: 311173 - DNA, 25 bp, Probe Sequence
tttttcatcctgtggtttttctaat

SEQ ID NO: 311174 - DNA, 25 bp, Probe Sequence
ttttctgtccgtaagtctttggcca

SEQ ID NO: 311175 - DNA, 25 bp, Probe Sequence
tttttctcactgaaaccttttccag

SEQ ID NO: 311176 - DNA, 25 bp, Probe Sequence
tttttctcctaatatgctgtttcca

SEQ ID NO: 311177 - DNA, 25 bp, Probe Sequence
tttttctcctcttaagttcattaag

SEQ ID NO: 311178 - DNA, 25 bp, Probe Sequence
ttttccttcctttaatcttatgcaa

SEQ ID NO: 311179 - DNA, 25 bp, Probe Sequence
ttttccattctacaccatggtaaaa

SEQ ID NO: 311180 - DNA, 25 bp, Probe Sequence
ttttttgtctaggcaccataatcga

SEQ ID NO: 311181 - DNA, 25 bp, Probe Sequence
tttttctcaattgacttaactgcat

SEQ ID NO: 311182 - DNA, 25 bp, Probe Sequence
tttttcagaattgactttcctcatc

SEQ ID NO: 311183 - DNA, 25 bp, Probe Sequence
ttattactgatttgaccttacctac

SEQ ID NO: 311184 - DNA, 25 bp, Probe Sequence
tttagactgaactgctccattccta

SEQ ID NO: 311185 - DNA, 25 bp, Probe Sequence
ttttgaagcaactcatcgattgatt

SEQ ID NO: 311186 - DNA, 25 bp, Probe Sequence
tttttgaagcaactcatcgattgat

SEQ ID NO: 311187 - DNA, 25 bp, Probe Sequence
tttatttagcagactgtggactgta

SEQ ID NO: 311188 - DNA, 25 bp, Probe Sequence
tttatttggagtggaggcattgttt

SEQ ID NO: 311189 - DNA, 25 bp, Probe Sequence
tttattatggtttcccttgtatcta

SEQ ID NO: 311190 - DNA, 25 bp, Probe Sequence
ttttcctgttcttacctattattgt

SEQ ID NO: 311191 - DNA, 25 bp, Probe Sequence
ttttccttttttgctatgaagttgc

SEQ ID NO: 311192 - DNA, 25 bp, Probe Sequence
ttttcttttgtttccaatgaccttg

SEQ ID NO: 311193 - DNA, 25 bp, Probe Sequence
tttttttctttgccgaaacctgcag

SEQ ID NO: 311194 - DNA, 25 bp, Probe Sequence
tttttcttgttacttatatccccag

SEQ ID NO: 311195 - DNA, 25 bp, Probe Sequence
ttttctttggtctttagtcacccag

SEQ ID NO: 311196 - DNA, 25 bp, Probe Sequence
ttcttatttggccaggtagctctcc

SEQ ID NO: 311197 - DNA, 25 bp, Probe Sequence
ttttttttgctacgcaattctcgat

SEQ ID NO: 311198 - DNA, 25 bp, Probe Sequence
ttttttcctgcctcaatatcttgat

SEQ ID NO: 311199 - DNA, 25 bp, Probe Sequence
ttagtgtccctggcccaatgataat

SEQ ID NO: 311200 - DNA, 25 bp, Probe Sequence
ttaggactggatcccataaaagtta

SEQ ID NO: 311201 - DNA, 25 bp, Probe Sequence
ttttcaccgagccctaaaagtaatg

SEQ ID NO: 311202 - DNA, 25 bp, Probe Sequence
ttttagctcccccaaacaagtgaga

SEQ ID NO: 311203 - DNA, 25 bp, Probe Sequence
ttttcacccgggaaagaggtgagag

SEQ ID NO: 311204 - DNA, 25 bp, Probe Sequence
ttttacctcagtggtgcagggtgtg

SEQ ID NO: 311205 - DNA, 25 bp, Probe Sequence
ttttcaaccaggcccaggtattgga

SEQ ID NO: 311206 - DNA, 25 bp, Probe Sequence
ttttaccacagggaagagtcagatg

SEQ ID NO: 311207 - DNA, 25 bp, Probe Sequence
ttttacccagtggagggctctctga

SEQ ID NO: 311208 - DNA, 25 bp, Probe Sequence
ttgttaccgttggggagttctatat

SEQ ID NO: 311209 - DNA, 25 bp, Probe Sequence
tttaccactggaactggagtcctta

SEQ ID NO: 311210 - DNA, 25 bp, Probe Sequence
tttagccacagtgtttgaggccagc

SEQ ID NO: 311211 - DNA, 25 bp, Probe Sequence
tttagccaactttctgtgaaggcca

SEQ ID NO: 311212 - DNA, 25 bp, Probe Sequence
tttaccaagatttttgtgtgaccat

SEQ ID NO: 311213 - DNA, 25 bp, Probe Sequence
tttagcaatatgacattcttggtga

SEQ ID NO: 311214 - DNA, 25 bp, Probe Sequence
tttatgtctcagaccatcttgtgag

SEQ ID NO: 311215 - DNA, 25 bp, Probe Sequence
ttatgatgtgcctacatgcatattt

SEQ ID NO: 311216 - DNA, 25 bp, Probe Sequence
ttagtgtgtgcataatagctacagt

SEQ ID NO: 311217 - DNA, 25 bp, Probe Sequence
ttcttcggctaaaggtacagttcct

SEQ ID NO: 311218 - DNA, 25 bp, Probe Sequence
ttttggcctaaagccagcatttcct

SEQ ID NO: 311219 - DNA, 25 bp, Probe Sequence
tttaggcactggaaccggcattggc

SEQ ID NO: 311220 - DNA, 25 bp, Probe Sequence
ttttggatatgtacccaggaatggg

SEQ ID NO: 311221 - DNA, 25 bp, Probe Sequence
tttagatgtcgtatccggagagagc

SEQ ID NO: 311222 - DNA, 25 bp, Probe Sequence
tttatttccagagtccggaggcagc

SEQ ID NO: 311223 - DNA, 25 bp, Probe Sequence
tttatttcacagttatcaggggatg

SEQ ID NO: 311224 - DNA, 25 bp, Probe Sequence
tttattgtacatcctccagtggcgt

SEQ ID NO: 311225 - DNA, 25 bp, Probe Sequence
tttatcttcattctcacactgacgt

SEQ ID NO: 311226 - DNA, 25 bp, Probe Sequence
ttttctgcacttctacactcaggta

SEQ ID NO: 311227 - DNA, 25 bp, Probe Sequence
ttttagcagctctctccaaagctgt

SEQ ID NO: 311228 - DNA, 25 bp, Probe Sequence
tttttcctgctagtgcaaaaggtag

SEQ ID NO: 311229 - DNA, 25 bp, Probe Sequence
tttttctgtgtaggctgcacaagag

SEQ ID NO: 311230 - DNA, 25 bp, Probe Sequence
tttttctggctaactgacaaaacca

SEQ ID NO: 311231 - DNA, 25 bp, Probe Sequence
ttttttcagcgagcagacaaaccac

SEQ ID NO: 311232 - DNA, 25 bp, Probe Sequence
ttttcaaactcagagacaaggactt

SEQ ID NO: 311233 - DNA, 25 bp, Probe Sequence
tttttgccaccaaatcacgggactt

SEQ ID NO: 311234 - DNA, 25 bp, Probe Sequence
ttttgtagccaaaaccaggcgtctc

SEQ ID NO: 311235 - DNA, 25 bp, Probe Sequence
ttttgctggctataagcggggtctc

SEQ ID NO: 311236 - DNA, 25 bp, Probe Sequence
tttttggctgggtgtggtggctcat

SEQ ID NO: 311237 - DNA, 25 bp, Probe Sequence
ttttgagggggctgtggggcttgtc

SEQ ID NO: 311238 - DNA, 25 bp, Probe Sequence
ttttgggactggcctttgaagctct

SEQ ID NO: 311239 - DNA, 25 bp, Probe Sequence
ttttggggctgcaagctactgcttc

SEQ ID NO: 311240 - DNA, 25 bp, Probe Sequence
ttttaaggctgtagcttgccgatgc

SEQ ID NO: 311241 - DNA, 25 bp, Probe Sequence
tttttagatcttcttgccagctcac

SEQ ID NO: 311242 - DNA, 25 bp, Probe Sequence
tttattgcagatgtctttagaggct

SEQ ID NO: 311243 - DNA, 25 bp, Probe Sequence
tttattggttttctatgaggcattt

SEQ ID NO: 311244 - DNA, 25 bp, Probe Sequence
tttattggttttcctcactaatctt

SEQ ID NO: 311245 - DNA, 25 bp, Probe Sequence
ttttgcttttctaggtcattaacgt

SEQ ID NO: 311246 - DNA, 25 bp, Probe Sequence
ttttcttttaaggtgacccatctgt

SEQ ID NO: 311247 - DNA, 25 bp, Probe Sequence
tttatttctgtatgtggagctaatg

SEQ ID NO: 311248 - DNA, 25 bp, Probe Sequence
ttatatcctttaggtagcaggacag

SEQ ID NO: 311249 - DNA, 25 bp, Probe Sequence
ttttccgtgctgtgtaggggctaac

SEQ ID NO: 311250 - DNA, 25 bp, Probe Sequence
ttttcagcacttgggattggggtta

SEQ ID NO: 311251 - DNA, 25 bp, Probe Sequence
ttttctactttgtctttgaactgaa

SEQ ID NO: 311252 - DNA, 25 bp, Probe Sequence
tttatccatttgtacattgatggac

SEQ ID NO: 311253 - DNA, 25 bp, Probe Sequence
ttttgatattcctaattgagtatta

SEQ ID NO: 311254 - DNA, 25 bp, Probe Sequence
ttttctttcgaagtgtggtgtcttt

SEQ ID NO: 311255 - DNA, 25 bp, Probe Sequence
ttttagtctctatcttcaggttatt

SEQ ID NO: 311256 - DNA, 25 bp, Probe Sequence
ttttcagttctagcttagtcattca

SEQ ID NO: 311257 - DNA, 25 bp, Probe Sequence
tttttttcaagctttagatatggct

SEQ ID NO: 311258 - DNA, 25 bp, Probe Sequence
ttttgttgttactttagttcatcag

SEQ ID NO: 311259 - DNA, 25 bp, Probe Sequence
ttttttgtcttaatataattccaag

SEQ ID NO: 311260 - DNA, 25 bp, Probe Sequence
ttttttgtcttattcagaagctccg

SEQ ID NO: 311261 - DNA, 25 bp, Probe Sequence
tttatttgccttatagatatgctca

SEQ ID NO: 311262 - DNA, 25 bp, Probe Sequence
tttttgttcttcataattatcacta

SEQ ID NO: 311263 - DNA, 25 bp, Probe Sequence
tttttgtatgtcactattttcacta

SEQ ID NO: 311264 - DNA, 25 bp, Probe Sequence
ttttttttttgctcatattcacata

SEQ ID NO: 311265 - DNA, 25 bp, Probe Sequence
tttttatattatgccgctttcaatc

SEQ ID NO: 311266 - DNA, 25 bp, Probe Sequence
tttatttctctcgctcctttagaaa

SEQ ID NO: 311267 - DNA, 25 bp, Probe Sequence
tttatggttctctccgcaagtataa

SEQ ID NO: 311268 - DNA, 25 bp, Probe Sequence
ttttggttctcacttccaacttagg

SEQ ID NO: 311269 - DNA, 25 bp, Probe Sequence
ttttgagtttcgtaccaccttattg

SEQ ID NO: 311270 - DNA, 25 bp, Probe Sequence
ttttgaagttggcacataacttttc

SEQ ID NO: 311271 - DNA, 25 bp, Probe Sequence
ttttaagtaggttcatttccatttg

SEQ ID NO: 311272 - DNA, 25 bp, Probe Sequence
ttttaaattgaccttcatacgcttt

SEQ ID NO: 311273 - DNA, 25 bp, Probe Sequence
ttttatattatgccgctttcaatcc

SEQ ID NO: 311274 - DNA, 25 bp, Probe Sequence
ttttcatatactggcctttaaatca

SEQ ID NO: 311275 - DNA, 25 bp, Probe Sequence
ttttcataactgcagtccttcaaag

SEQ ID NO: 311276 - DNA, 25 bp, Probe Sequence
tttttaaattgtaccaatcacaaga

SEQ ID NO: 311277 - DNA, 25 bp, Probe Sequence
tttttaacttgccccaatgatagaa

SEQ ID NO: 311278 - DNA, 25 bp, Probe Sequence
tttttaactatccagtcaactttca

SEQ ID NO: 311279 - DNA, 25 bp, Probe Sequence
tttattgacaatacgctttacttta

SEQ ID NO: 311280 - DNA, 25 bp, Probe Sequence
ttttatgagacttcctattaattta

SEQ ID NO: 311281 - DNA, 25 bp, Probe Sequence
ttttagaaatcagctacccattata

SEQ ID NO: 311282 - DNA, 25 bp, Probe Sequence
tttttctaataggtactgccatatt

SEQ ID NO: 311283 - DNA, 25 bp, Probe Sequence
tttttctcctatgtactgtgaacat

SEQ ID NO: 311284 - DNA, 25 bp, Probe Sequence
ttttttccgcatgtacgctcataat

SEQ ID NO: 311285 - DNA, 25 bp, Probe Sequence
tttttggttcatcgtcacctcaacc

SEQ ID NO: 311286 - DNA, 25 bp, Probe Sequence
tttttttctgagctactcggactct

SEQ ID NO: 311287 - DNA, 25 bp, Probe Sequence
ttttttttggcaagactccgtctca

SEQ ID NO: 311288 - DNA, 25 bp, Probe Sequence
ttttttcctatggaggctcccttca

SEQ ID NO: 311289 - DNA, 25 bp, Probe Sequence
ttttaatcctcaggcagtgcatccc

SEQ ID NO: 311290 - DNA, 25 bp, Probe Sequence
ttttaagcccatgaatcagccgcgg

SEQ ID NO: 311291 - DNA, 25 bp, Probe Sequence
ttgttgggcaccgaaatcacgggac

SEQ ID NO: 311292 - DNA, 25 bp, Probe Sequence
ttttggcacccaaatcaacgggact

SEQ ID NO: 311293 - DNA, 25 bp, Probe Sequence
ttttggcacccaaatcaacgggact

SEQ ID NO: 311294 - DNA, 25 bp, Probe Sequence
ttttggcacccaaatcaacgggact

SEQ ID NO: 311295 - DNA, 25 bp, Probe Sequence
ttttggcacccaaatcaacgggact

SEQ ID NO: 311296 - DNA, 25 bp, Probe Sequence
ttttggcaccgtcgatctacgggat

SEQ ID NO: 311297 - DNA, 25 bp, Probe Sequence
ttttgctaccaatatcatacgggac

SEQ ID NO: 311298 - DNA, 25 bp, Probe Sequence
ttttgtaccaaagtcaactgcacgt

SEQ ID NO: 311299 - DNA, 25 bp, Probe Sequence
ttttctcatcactaaccagactcct

SEQ ID NO: 311300 - DNA, 25 bp, Probe Sequence
tttatcagatcaaaaccaacccggt

SEQ ID NO: 311301 - DNA, 25 bp, Probe Sequence
ttttcaaattaaagccagtcctggg

SEQ ID NO: 311302 - DNA, 25 bp, Probe Sequence
ttttcacaaaataagcagcttgctt

SEQ ID NO: 311303 - DNA, 25 bp, Probe Sequence
ttttctgaacctgatagttttcacc

SEQ ID NO: 311304 - DNA, 25 bp, Probe Sequence
tttttaatccatcacacttttcttc

SEQ ID NO: 311305 - DNA, 25 bp, Probe Sequence
tttattaattgcaccccattagccc

SEQ ID NO: 311306 - DNA, 25 bp, Probe Sequence
ttttcatccattcaccctattagtg

SEQ ID NO: 311307 - DNA, 25 bp, Probe Sequence
ttttaacatcttctcccactaggaa

SEQ ID NO: 311308 - DNA, 25 bp, Probe Sequence
ttttaatgaatatgacccctataga

SEQ ID NO: 311309 - DNA, 25 bp, Probe Sequence
ttttcagagaaatatcacaaattag

SEQ ID NO: 311310 - DNA, 25 bp, Probe Sequence
tttttagataatctcactaatctgg

SEQ ID NO: 311311 - DNA, 25 bp, Probe Sequence
ttcctttgtgaataccctatctgac

SEQ ID NO: 311312 - DNA, 25 bp, Probe Sequence
ttttctttcattacaccctagctga

SEQ ID NO: 311313 - DNA, 25 bp, Probe Sequence
ttttctgtgccaaatcctaaacgat

SEQ ID NO: 311314 - DNA, 25 bp, Probe Sequence
tttatctgtccaatgtgccataaca

SEQ ID NO: 311315 - DNA, 25 bp, Probe Sequence
ttttcaatgcagagaccataatcaa

SEQ ID NO: 311316 - DNA, 25 bp, Probe Sequence
ttttcacagctcagccctagagaaa

SEQ ID NO: 311317 - DNA, 25 bp, Probe Sequence
ttattccatttgtacctaagagaaa

SEQ ID NO: 311318 - DNA, 25 bp, Probe Sequence
tttttcaacatgtagggcaagagga

SEQ ID NO: 311319 - DNA, 25 bp, Probe Sequence
tttttcaactgtatgtagggctgca

SEQ ID NO: 311320 - DNA, 25 bp, Probe Sequence
tttttccctgcaattaaagtgctgt

SEQ ID NO: 311321 - DNA, 25 bp, Probe Sequence
tttatgtcacccatgatgaaaactg

SEQ ID NO: 311322 - DNA, 25 bp, Probe Sequence
ttttcacagccacctatgtacatac

SEQ ID NO: 311323 - DNA, 25 bp, Probe Sequence
ttttacccacatctgcgagtacacg

SEQ ID NO: 311324 - DNA, 25 bp, Probe Sequence
ttttattcgcaccattgcggtcgcg

SEQ ID NO: 311325 - DNA, 25 bp, Probe Sequence
ttttattctcccttacaatccaaat

SEQ ID NO: 311326 - DNA, 25 bp, Probe Sequence
ttttttccttggttcaattcaaatg

SEQ ID NO: 311327 - DNA, 25 bp, Probe Sequence
ttttttactgtgcttcaaataaata

SEQ ID NO: 311328 - DNA, 25 bp, Probe Sequence
ttttcttttgcgcaataaatgatca

SEQ ID NO: 311329 - DNA, 25 bp, Probe Sequence
ttttcatatttaagcacatacctat

SEQ ID NO: 311330 - DNA, 25 bp, Probe Sequence
tttatctttcaaaccaactctttag

SEQ ID NO: 311331 - DNA, 25 bp, Probe Sequence
ttctactctgtggccccaaatttta

SEQ ID NO: 311332 - DNA, 25 bp, Probe Sequence
ttttcttgatccgatccactagtga

SEQ ID NO: 311333 - DNA, 25 bp, Probe Sequence
ttttcatcgtctgtcaggtggagat

SEQ ID NO: 311334 - DNA, 25 bp, Probe Sequence
ttttgaagctccctagtgagaggat

SEQ ID NO: 311335 - DNA, 25 bp, Probe Sequence
ttaattttcctgaagcttgcaggat

SEQ ID NO: 311336 - DNA, 25 bp, Probe Sequence
ttttttttggtacttcaggatagca

SEQ ID NO: 311337 - DNA, 25 bp, Probe Sequence
tttatatttacgtattctccaaagc

SEQ ID NO: 311338 - DNA, 25 bp, Probe Sequence
tttatctgttaactattatccaaac

SEQ ID NO: 311339 - DNA, 25 bp, Probe Sequence
ttttcttctcaactattggcagaat

SEQ ID NO: 311340 - DNA, 25 bp, Probe Sequence
ttgtgtctactctaggactgggccc

SEQ ID NO: 311341 - DNA, 25 bp, Probe Sequence
tttttcccacaggaagagcccacat

SEQ ID NO: 311342 - DNA, 25 bp, Probe Sequence
ttggggcccaaggatctacccagaa

SEQ ID NO: 311343 - DNA, 25 bp, Probe Sequence
ttgggagacccgttatgacctaatc

SEQ ID NO: 311344 - DNA, 25 bp, Probe Sequence
ttttgatacctctttatgacttaac

SEQ ID NO: 311345 - DNA, 25 bp, Probe Sequence
tttatgacctccttttggtctgaaa

SEQ ID NO: 311346 - DNA, 25 bp, Probe Sequence
tttatacctcttattgtttcaaatt

SEQ ID NO: 311347 - DNA, 25 bp, Probe Sequence
tttatatcactttgagtatgttctc

SEQ ID NO: 311348 - DNA, 25 bp, Probe Sequence
tttattgcctgatagttattccaac

SEQ ID NO: 311349 - DNA, 25 bp, Probe Sequence
ttttcctgtgcacagtcacattccc

SEQ ID NO: 311350 - DNA, 25 bp, Probe Sequence
ttttgccagcatggagatgatcctg

SEQ ID NO: 311351 - DNA, 25 bp, Probe Sequence
tttttagcactggatgtagcatgac

SEQ ID NO: 311352 - DNA, 25 bp, Probe Sequence
tttttgagacatcgcatcatcaaaa

SEQ ID NO: 311353 - DNA, 25 bp, Probe Sequence
tttttgatgacttctcacactatga

SEQ ID NO: 311354 - DNA, 25 bp, Probe Sequence
tttttatgccttccattgtgatgac

SEQ ID NO: 311355 - DNA, 25 bp, Probe Sequence
ttgttccctctgcaactggatgagc

SEQ ID NO: 311356 - DNA, 25 bp, Probe Sequence
ttttctgcctcactgaagcgaataa

SEQ ID NO: 311357 - DNA, 25 bp, Probe Sequence
tttatcgcccctgagaagatctacc

SEQ ID NO: 311358 - DNA, 25 bp, Probe Sequence
ttttcgaccctcagaatgataaacc

SEQ ID NO: 311359 - DNA, 25 bp, Probe Sequence
tttttgaccctcccatagaagacac

SEQ ID NO: 311360 - DNA, 25 bp, Probe Sequence
tttttggccgctcgcaataccaaag

SEQ ID NO: 311361 - DNA, 25 bp, Probe Sequence
tttttgccctctggcagtacatcaa

SEQ ID NO: 311362 - DNA, 25 bp, Probe Sequence
ttttctaactcaggagtcagccaac

SEQ ID NO: 311363 - DNA, 25 bp, Probe Sequence
ttttcaactctaggacgcaaaacga

SEQ ID NO: 311364 - DNA, 25 bp, Probe Sequence
tttttctctcttgaacaaaactgag

SEQ ID NO: 311365 - DNA, 25 bp, Probe Sequence
tttttcctcatacaagtaaacacag

SEQ ID NO: 311366 - DNA, 25 bp, Probe Sequence
ttttgtcctcttttcagtgaaacag

SEQ ID NO: 311367 - DNA, 25 bp, Probe Sequence
tttatttctttactggatcttcaca

SEQ ID NO: 311368 - DNA, 25 bp, Probe Sequence
ttttttctttcacgtacatccatca

SEQ ID NO: 311369 - DNA, 25 bp, Probe Sequence
tttttgaattttcctagcatcgccc

SEQ ID NO: 311370 - DNA, 25 bp, Probe Sequence
tttttaactgtttgccactgctgcc

SEQ ID NO: 311371 - DNA, 25 bp, Probe Sequence
tttttaactgtttgccactgctgcc

SEQ ID NO: 311372 - DNA, 25 bp, Probe Sequence
ttttctaccttggcagaacatgtac

SEQ ID NO: 311373 - DNA, 25 bp, Probe Sequence
ttttctaccatttctgcaagttagg

SEQ ID NO: 311374 - DNA, 25 bp, Probe Sequence
ttttatactagttctacatttacct

SEQ ID NO: 311375 - DNA, 25 bp, Probe Sequence
ttttctacaagtttgaccttagcca

SEQ ID NO: 311376 - DNA, 25 bp, Probe Sequence
tttttacaacattcaactttagtat

SEQ ID NO: 311377 - DNA, 25 bp, Probe Sequence
ttttctgagcgttcctactttaaag

SEQ ID NO: 311378 - DNA, 25 bp, Probe Sequence
tttttgtactaactagcattgtaaa

SEQ ID NO: 311379 - DNA, 25 bp, Probe Sequence
ttttcagtatctctgtacctgttaa

SEQ ID NO: 311380 - DNA, 25 bp, Probe Sequence
ttttcaacactcttacacctgttat

SEQ ID NO: 311381 - DNA, 25 bp, Probe Sequence
ttttaaccctcttctgcaagtttgt

SEQ ID NO: 311382 - DNA, 25 bp, Probe Sequence
ttttaaagacccagcacgtcatttt

SEQ ID NO: 311383 - DNA, 25 bp, Probe Sequence
tttttaaatgcagcatccacttcat

SEQ ID NO: 311384 - DNA, 25 bp, Probe Sequence
ttttctatttgggcatcacttcaca

SEQ ID NO: 311385 - DNA, 25 bp, Probe Sequence
tttatcttgttgacgcatgagctgt

SEQ ID NO: 311386 - DNA, 25 bp, Probe Sequence
ttttctctcttggagcatgcatgga

SEQ ID NO: 311387 - DNA, 25 bp, Probe Sequence
ttttttgcatccccatgcaggaaac

SEQ ID NO: 311388 - DNA, 25 bp, Probe Sequence
tttttctgctcctttgtggaaggca

SEQ ID NO: 311389 - DNA, 25 bp, Probe Sequence
tttattctggcctggggcacaagag

SEQ ID NO: 311390 - DNA, 25 bp, Probe Sequence
tttttgaggccattgggttccagaa

SEQ ID NO: 311391 - DNA, 25 bp, Probe Sequence
tttttcaggccaaagcagctttaaa

SEQ ID NO: 311392 - DNA, 25 bp, Probe Sequence
tttttgacatacatagcctattaaa

SEQ ID NO: 311393 - DNA, 25 bp, Probe Sequence
tttttgcattcacctagactattat

SEQ ID NO: 311394 - DNA, 25 bp, Probe Sequence
ttttgctcttcacataaagcttgct

SEQ ID NO: 311395 - DNA, 25 bp, Probe Sequence
ttttgtcagctacatcctactgtgc

SEQ ID NO: 311396 - DNA, 25 bp, Probe Sequence
tttttctggacaatgccagcatttg

SEQ ID NO: 311397 - DNA, 25 bp, Probe Sequence
tttattcagaactatgtggtgtcag

SEQ ID NO: 311398 - DNA, 25 bp, Probe Sequence
tttattcgcaccattgcggtcgcgc

SEQ ID NO: 311399 - DNA, 25 bp, Probe Sequence
tttatcgtactctttggagatgccc

SEQ ID NO: 311400 - DNA, 25 bp, Probe Sequence
ttcatacggttattggggctgtgcc

SEQ ID NO: 311401 - DNA, 25 bp, Probe Sequence
tttatgcggtattcattggtgccta

SEQ ID NO: 311402 - DNA, 25 bp, Probe Sequence
ttttgaggttccatctgtcttgctt

SEQ ID NO: 311403 - DNA, 25 bp, Probe Sequence
ttttgaagttgcagtccatcacctt

SEQ ID NO: 311404 - DNA, 25 bp, Probe Sequence
tttataattttactcactcactctg

SEQ ID NO: 311405 - DNA, 25 bp, Probe Sequence
tttttaatgttagtgatccacctgc

SEQ ID NO: 311406 - DNA, 25 bp, Probe Sequence
tttttaatatgtttgattcacttta

SEQ ID NO: 311407 - DNA, 25 bp, Probe Sequence
tttatcaagattatctgttctttta

SEQ ID NO: 311408 - DNA, 25 bp, Probe Sequence
tttattgtctatatccccttttata

SEQ ID NO: 311409 - DNA, 25 bp, Probe Sequence
tttttgtatatcctcccaatctttt

SEQ ID NO: 311410 - DNA, 25 bp, Probe Sequence
tttttgtgcattgtcctcatgcctg

SEQ ID NO: 311411 - DNA, 25 bp, Probe Sequence
ttttcttcattcagcttagcctttc

SEQ ID NO: 311412 - DNA, 25 bp, Probe Sequence
ttattctgggtcatctatagaagtt

SEQ ID NO: 311413 - DNA, 25 bp, Probe Sequence
ttattcttttttctgcaatagttgg

SEQ ID NO: 311414 - DNA, 25 bp, Probe Sequence
ttttctgttttcagtaaagtctcgt

SEQ ID NO: 311415 - DNA, 25 bp, Probe Sequence
ttttttcttttcctataatgttctg

SEQ ID NO: 311416 - DNA, 25 bp, Probe Sequence
tttttacttttccgtcatcagtatt

SEQ ID NO: 311417 - DNA, 25 bp, Probe Sequence
ttttttttttttgcattgtatgtca

SEQ ID NO: 311418 - DNA, 25 bp, Probe Sequence
tttttttcattggtgtactgtgttt

SEQ ID NO: 311419 - DNA, 25 bp, Probe Sequence
tttttactctgtgttaccattttga

SEQ ID NO: 311420 - DNA, 25 bp, Probe Sequence
tttataaatattgttgatctttttg

SEQ ID NO: 311421 - DNA, 25 bp, Probe Sequence
ttttatttattgctggttttcctgg

SEQ ID NO: 311422 - DNA, 25 bp, Probe Sequence
tttttttggctcatgaatttttctg

SEQ ID NO: 311423 - DNA, 25 bp, Probe Sequence
tttttgtcattctttaattttgttg

SEQ ID NO: 311424 - DNA, 25 bp, Probe Sequence
ttttagctcttgcatcaagatcttt

SEQ ID NO: 311425 - DNA, 25 bp, Probe Sequence
ttttgacttatgcacatattttttc

SEQ ID NO: 311426 - DNA, 25 bp, Probe Sequence
ttttgtccttgagaaccttgtcctc

SEQ ID NO: 311427 - DNA, 25 bp, Probe Sequence
ttttgttaatgtgtagagttctcct

SEQ ID NO: 311428 - DNA, 25 bp, Probe Sequence
ttgtttttacttacaggtgttctgc

SEQ ID NO: 311429 - DNA, 25 bp, Probe Sequence
ttttgttgtactgttatggcttctg

SEQ ID NO: 311430 - DNA, 25 bp, Probe Sequence
ttttgttgttcgtttgtggtttctg

SEQ ID NO: 311431 - DNA, 25 bp, Probe Sequence
ttttttttcctgtgtgtgtggcctt

SEQ ID NO: 311432 - DNA, 25 bp, Probe Sequence
ttttttctttcgaagtgtggtgtct

SEQ ID NO: 311433 - DNA, 25 bp, Probe Sequence
tttttcctctgtatactgcgttgtt

SEQ ID NO: 311434 - DNA, 25 bp, Probe Sequence
tttttcctctcttcatactgtttga

SEQ ID NO: 311435 - DNA, 25 bp, Probe Sequence
ttttatttgtcatctagtctcaagt

SEQ ID NO: 311436 - DNA, 25 bp, Probe Sequence
ttttgttttgctacgagtccacatt

SEQ ID NO: 311437 - DNA, 25 bp, Probe Sequence
ttttttctgctggtggatttacata

SEQ ID NO: 311438 - DNA, 25 bp, Probe Sequence
ttttttctgcacagcttttccaaaa

SEQ ID NO: 311439 - DNA, 25 bp, Probe Sequence
tttatttcatcacttgttatctcaa

SEQ ID NO: 311440 - DNA, 25 bp, Probe Sequence
ttttcttctgccaatttactatgat

SEQ ID NO: 311441 - DNA, 25 bp, Probe Sequence
ttttcttctgccaatttactatgat

SEQ ID NO: 311442 - DNA, 25 bp, Probe Sequence
ttttttggcctgtttgatgtatgtg

SEQ ID NO: 311443 - DNA, 25 bp, Probe Sequence
tttttcggacagtttatttgttgag

SEQ ID NO: 311444 - DNA, 25 bp, Probe Sequence
tttttgcgtcagcttccttttagag

SEQ ID NO: 311445 - DNA, 25 bp, Probe Sequence
tttttgcgtcagcttccttttagag

SEQ ID NO: 311446 - DNA, 25 bp, Probe Sequence
tttttgttagattctctcatttaaa

SEQ ID NO: 311447 - DNA, 25 bp, Probe Sequence
tttttgtctatgaagttgctgttta

SEQ ID NO: 311448 - DNA, 25 bp, Probe Sequence
tttttgctttgggctctgctatttg

SEQ ID NO: 311449 - DNA, 25 bp, Probe Sequence
ttattatgcactaaccttttttggt

SEQ ID NO: 311450 - DNA, 25 bp, Probe Sequence
tttatatatctcaaagctttttcta

SEQ ID NO: 311451 - DNA, 25 bp, Probe Sequence
ttctaatactaatgttatttcttaa

SEQ ID NO: 311452 - DNA, 25 bp, Probe Sequence
ttcttctactaccagtaattttcaa

SEQ ID NO: 311453 - DNA, 25 bp, Probe Sequence
ttttctaaaggagtttatgttccat

SEQ ID NO: 311454 - DNA, 25 bp, Probe Sequence
tttttcacgtggattttgcttggat

SEQ ID NO: 311455 - DNA, 25 bp, Probe Sequence
tttttccctcagattcattttaaca

SEQ ID NO: 311456 - DNA, 25 bp, Probe Sequence
ttttttccgcagacttctttctgca

SEQ ID NO: 311457 - DNA, 25 bp, Probe Sequence
ttttttgtacaggttctgattctaa

SEQ ID NO: 311458 - DNA, 25 bp, Probe Sequence
tttttttcactggagttacattaat

SEQ ID NO: 311459 - DNA, 25 bp, Probe Sequence
ttttctttaccccaattcattacat

SEQ ID NO: 311460 - DNA, 25 bp, Probe Sequence
ttttttctacctgcttgtcttattt

SEQ ID NO: 311461 - DNA, 25 bp, Probe Sequence
tttttttagccatcattatatgttt

SEQ ID NO: 311462 - DNA, 25 bp, Probe Sequence
tttttcttatgtctcttgttgagtt

SEQ ID NO: 311463 - DNA, 25 bp, Probe Sequence
tttttcacttgacatgcttattaga

SEQ ID NO: 311464 - DNA, 25 bp, Probe Sequence
tttttcttctgccaatttactatga

SEQ ID NO: 311465 - DNA, 25 bp, Probe Sequence
ttttcttcgcatattttactgtcag

SEQ ID NO: 311466 - DNA, 25 bp, Probe Sequence
ttatgttttaggagattacgtcagt

SEQ ID NO: 311467 - DNA, 25 bp, Probe Sequence
ttctttttgaggaagacgcggtcgt

SEQ ID NO: 311468 - DNA, 25 bp, Probe Sequence
ttttttttggagaaggcgtcttgct

SEQ ID NO: 311469 - DNA, 25 bp, Probe Sequence
ttttttttgaggcagactctctgtc

SEQ ID NO: 311470 - DNA, 25 bp, Probe Sequence
tttttccttggtgcgacactgtgca

SEQ ID NO: 311471 - DNA, 25 bp, Probe Sequence
ttttctacggttgcaaactgctgac

SEQ ID NO: 311472 - DNA, 25 bp, Probe Sequence
ttttcccaggtttgtcaacgtgact

SEQ ID NO: 311473 - DNA, 25 bp, Probe Sequence
ttttctacagttttttccgcagact

SEQ ID NO: 311474 - DNA, 25 bp, Probe Sequence
ttttttaggttttgtccatagcatc

SEQ ID NO: 311475 - DNA, 25 bp, Probe Sequence
ttttttgagtggctatctcatttat

SEQ ID NO: 311476 - DNA, 25 bp, Probe Sequence
tttttctgtgtggagtatttttata

SEQ ID NO: 311477 - DNA, 25 bp, Probe Sequence
ttttatcagtgcttggttggtttta

SEQ ID NO: 311478 - DNA, 25 bp, Probe Sequence
tttttctgtcttaggtggtttcatt

SEQ ID NO: 311479 - DNA, 25 bp, Probe Sequence
tttttgcctgttagtgattgtttca

SEQ ID NO: 311480 - DNA, 25 bp, Probe Sequence
ttttggccgttagttatctattact

SEQ ID NO: 311481 - DNA, 25 bp, Probe Sequence
tttttgctgtttgtacactaaacac

SEQ ID NO: 311482 - DNA, 25 bp, Probe Sequence
tttttcattctccctaaccaaggca

SEQ ID NO: 311483 - DNA, 25 bp, Probe Sequence
ttagagaattcagtaccaaccaagc

SEQ ID NO: 311484 - DNA, 25 bp, Probe Sequence
ttacaaccattcaatgccccgaagc

SEQ ID NO: 311485 - DNA, 25 bp, Probe Sequence
ttatgaagctgcatcactgtcctgg

SEQ ID NO: 311486 - DNA, 25 bp, Probe Sequence
ttgagatccaggtacactcctggga

SEQ ID NO: 311487 - DNA, 25 bp, Probe Sequence
ttgtgaccgagattcccgacgagag

SEQ ID NO: 311488 - DNA, 25 bp, Probe Sequence
ttagagttgagttcccgagagggcc

SEQ ID NO: 311489 - DNA, 25 bp, Probe Sequence
ttttttgcagtctacctcagaggtg

SEQ ID NO: 311490 - DNA, 25 bp, Probe Sequence
tttttctcaggctgccctgaggatc

SEQ ID NO: 311491 - DNA, 25 bp, Probe Sequence
ttttacctagctaccactaggtgga

SEQ ID NO: 311492 - DNA, 25 bp, Probe Sequence
ttttcaacaagcacgaccatggatg

SEQ ID NO: 311493 - DNA, 25 bp, Probe Sequence
ttattaaaatcaggcaattcaggtc

SEQ ID NO: 311494 - DNA, 25 bp, Probe Sequence
ttttaaattcgatcttcagctgtac

SEQ ID NO: 311495 - DNA, 25 bp, Probe Sequence
ttttaacttgcgtgtctgcagtcaa

SEQ ID NO: 311496 - DNA, 25 bp, Probe Sequence
tttttatcttgcctgttggcttcaa

SEQ ID NO: 311497 - DNA, 25 bp, Probe Sequence
ttttttctcagctattctgagctta

SEQ ID NO: 311498 - DNA, 25 bp, Probe Sequence
ttttcagtcttgtagtgtgtgctta

SEQ ID NO: 311499 - DNA, 25 bp, Probe Sequence
ttatccggccaggagttgtgactca

SEQ ID NO: 311500 - DNA, 25 bp, Probe Sequence
ttaccgtcctctaggtaactcaagt

SEQ ID NO: 311501 - DNA, 25 bp, Probe Sequence
tttttgtccctagctttctatatgt

SEQ ID NO: 311502 - DNA, 25 bp, Probe Sequence
ttttttccctatctgtatctatagc

SEQ ID NO: 311503 - DNA, 25 bp, Probe Sequence
tttttcttttatcatgagatgtaat

SEQ ID NO: 311504 - DNA, 25 bp, Probe Sequence
ttttttcttccttagagattattat

SEQ ID NO: 311505 - DNA, 25 bp, Probe Sequence
ttttttctgatcttataagctttat

SEQ ID NO: 311506 - DNA, 25 bp, Probe Sequence
tttttctcttctctaacgatgctga

SEQ ID NO: 311507 - DNA, 25 bp, Probe Sequence
ttttcttctgttgaatgacacagtg

SEQ ID NO: 311508 - DNA, 25 bp, Probe Sequence
ttttcacttttggcaatgactcaaa

SEQ ID NO: 311509 - DNA, 25 bp, Probe Sequence
tttttcttttcccgacagcacaaag

SEQ ID NO: 311510 - DNA, 25 bp, Probe Sequence
tttttcttttcccgacagcacaaag

SEQ ID NO: 311511 - DNA, 25 bp, Probe Sequence
tttttcttttcccgacagcacaaag

SEQ ID NO: 311512 - DNA, 25 bp, Probe Sequence
ttatttctgtttgtcgataagaaat

SEQ ID NO: 311513 - DNA, 25 bp, Probe Sequence
ttttttgcttattttgttggagtat

SEQ ID NO: 311514 - DNA, 25 bp, Probe Sequence
tttttctgcttcaagttcttaggtc

SEQ ID NO: 311515 - DNA, 25 bp, Probe Sequence
tttttcatctcttagtgatcttctg

SEQ ID NO: 311516 - DNA, 25 bp, Probe Sequence
ttatcttgctaatattacttctggg

SEQ ID NO: 311517 - DNA, 25 bp, Probe Sequence
ttattactagtcttttcctctagga

SEQ ID NO: 311518 - DNA, 25 bp, Probe Sequence
ttttactgatcttctgttcttcaca

SEQ ID NO: 311519 - DNA, 25 bp, Probe Sequence
ttttgcatcgataccattttataga

SEQ ID NO: 311520 - DNA, 25 bp, Probe Sequence
ttttctagatgtcctttttcaaatt

SEQ ID NO: 311521 - DNA, 25 bp, Probe Sequence
ttttcttgacttcttttatatagta

SEQ ID NO: 311522 - DNA, 25 bp, Probe Sequence
tttttgctacttttgctgttttatt

SEQ ID NO: 311523 - DNA, 25 bp, Probe Sequence
tttttctatttcttgctccttagaa

SEQ ID NO: 311524 - DNA, 25 bp, Probe Sequence
ttttttgtatttgctcttgtataat

SEQ ID NO: 311525 - DNA, 25 bp, Probe Sequence
tttttttttctgtcacactgattaa

SEQ ID NO: 311526 - DNA, 25 bp, Probe Sequence
ttataatttcttctcacctcttaat

SEQ ID NO: 311527 - DNA, 25 bp, Probe Sequence
ttttcattttggctcaccgtggatt

SEQ ID NO: 311528 - DNA, 25 bp, Probe Sequence
ttttattttggccgctcgcggcggc

SEQ ID NO: 311529 - DNA, 25 bp, Probe Sequence
ttttattttcccctgtggtcagtgc

SEQ ID NO: 311530 - DNA, 25 bp, Probe Sequence
ttttcattttcagggttgagtactc

SEQ ID NO: 311531 - DNA, 25 bp, Probe Sequence
ttttctgtgctaagggtccagtatt

SEQ ID NO: 311532 - DNA, 25 bp, Probe Sequence
ttttctgatgcttggtagtcaaata

SEQ ID NO: 311533 - DNA, 25 bp, Probe Sequence
ttttattctgggtcatctatagaag

SEQ ID NO: 311534 - DNA, 25 bp, Probe Sequence
tttttcttagctggcatgccataaa

SEQ ID NO: 311535 - DNA, 25 bp, Probe Sequence
tttttttatctaatgatcatcatga

SEQ ID NO: 311536 - DNA, 25 bp, Probe Sequence
ttttttatctaatgatcatcatgaa

SEQ ID NO: 311537 - DNA, 25 bp, Probe Sequence
ttttttatctcaaaatgccgaacga

SEQ ID NO: 311538 - DNA, 25 bp, Probe Sequence
ttttgcgtcatgccgtaatgccgcc

SEQ ID NO: 311539 - DNA, 25 bp, Probe Sequence
tttttctcagtcaatttgccagcca

SEQ ID NO: 311540 - DNA, 25 bp, Probe Sequence
tttttctcagtaaatcatatcatct

SEQ ID NO: 311541 - DNA, 25 bp, Probe Sequence
ttttctctagatatgcattagcagc

SEQ ID NO: 311542 - DNA, 25 bp, Probe Sequence
ttttttcacatgctgcatgtccgca

SEQ ID NO: 311543 - DNA, 25 bp, Probe Sequence
ttttatccatcaagtctgtacccaa

SEQ ID NO: 311544 - DNA, 25 bp, Probe Sequence
tttttccatcatatctcaaagtaaa

SEQ ID NO: 311545 - DNA, 25 bp, Probe Sequence
tttttcacacatagatttaagtatc

SEQ ID NO: 311546 - DNA, 25 bp, Probe Sequence
ttttccaatatgaactcatgcaagt

SEQ ID NO: 311547 - DNA, 25 bp, Probe Sequence
ttttcctaatatgctcgcaggttag

SEQ ID NO: 311548 - DNA, 25 bp, Probe Sequence
ttttcctaatagttggggcttatat

SEQ ID NO: 311549 - DNA, 25 bp, Probe Sequence
ttttcccgaaacttggtgtctatca

SEQ ID NO: 311550 - DNA, 25 bp, Probe Sequence
ttttacctaatttggagctttctca

SEQ ID NO: 311551 - DNA, 25 bp, Probe Sequence
ttttcacctattaccagtgttccct

SEQ ID NO: 311552 - DNA, 25 bp, Probe Sequence
tttttgccaattaacagtatgtgcc

SEQ ID NO: 311553 - DNA, 25 bp, Probe Sequence
ttttggccaagttacagtcaatggg

SEQ ID NO: 311554 - DNA, 25 bp, Probe Sequence
ttttggctaacatgcagcagtgaag

SEQ ID NO: 311555 - DNA, 25 bp, Probe Sequence
ttctttgtaacctgtgtgaagcagc

SEQ ID NO: 311556 - DNA, 25 bp, Probe Sequence
ttttgtggaacctgagttgcaagca

SEQ ID NO: 311557 - DNA, 25 bp, Probe Sequence
ttttgtggaaccagtgatgcctcaa

SEQ ID NO: 311558 - DNA, 25 bp, Probe Sequence
ttttgggaagctgttttgcatatga

SEQ ID NO: 311559 - DNA, 25 bp, Probe Sequence
ttattaccaagcgcttctttctgac

SEQ ID NO: 311560 - DNA, 25 bp, Probe Sequence
ttgttcccacctgattttgtgacac

SEQ ID NO: 311561 - DNA, 25 bp, Probe Sequence
ttgttcacacatgtctttaggtgga

SEQ ID NO: 311562 - DNA, 25 bp, Probe Sequence
ttttcagccacagtcttatcaagta

SEQ ID NO: 311563 - DNA, 25 bp, Probe Sequence
ttattcagccatatcccaaggtaga

SEQ ID NO: 311564 - DNA, 25 bp, Probe Sequence
ttatcccgataccccacaggtaaat

SEQ ID NO: 311565 - DNA, 25 bp, Probe Sequence
ttatactctgcttagtctcaaggta

SEQ ID NO: 311566 - DNA, 25 bp, Probe Sequence
ttatacttcatctgacatccaggtg

SEQ ID NO: 311567 - DNA, 25 bp, Probe Sequence
ttatatctatacctagcaccagtgc

SEQ ID NO: 311568 - DNA, 25 bp, Probe Sequence
ttttctatactctaatcagcactga

SEQ ID NO: 311569 - DNA, 25 bp, Probe Sequence
ttttcttaccaggagcagcattgag

SEQ ID NO: 311570 - DNA, 25 bp, Probe Sequence
ttttcatgcatcacagaagtgctat

SEQ ID NO: 311571 - DNA, 25 bp, Probe Sequence
ttttggcgcccacagtgatgatgtc

SEQ ID NO: 311572 - DNA, 25 bp, Probe Sequence
ttttagcctcgcaggacagcatcac

SEQ ID NO: 311573 - DNA, 25 bp, Probe Sequence
ttttagccttattgcacaccaactc

SEQ ID NO: 311574 - DNA, 25 bp, Probe Sequence
ttttagctgctttatcatctttacc

SEQ ID NO: 311575 - DNA, 25 bp, Probe Sequence
ttttgtgatcgtgacacttctactc

SEQ ID NO: 311576 - DNA, 25 bp, Probe Sequence
ttttgtagcaggcagagattcttcc

SEQ ID NO: 311577 - DNA, 25 bp, Probe Sequence
ttgcattagagcacggagtccgtcc

SEQ ID NO: 311578 - DNA, 25 bp, Probe Sequence
ttgtgtagaatttctagatcccccg

SEQ ID NO: 311579 - DNA, 25 bp, Probe Sequence
tttttagcattactgtcactctccc

SEQ ID NO: 311580 - DNA, 25 bp, Probe Sequence
tttttcctgctagtgtagcttctga

SEQ ID NO: 311581 - DNA, 25 bp, Probe Sequence
tttttcctgcatgttctgtgactga

SEQ ID NO: 311582 - DNA, 25 bp, Probe Sequence
tttttatctcatattagtgcctgtg

SEQ ID NO: 311583 - DNA, 25 bp, Probe Sequence
tttttatctcatattagtgcctgtg

SEQ ID NO: 311584 - DNA, 25 bp, Probe Sequence
tttttagccatcattatatgtttaa

SEQ ID NO: 311585 - DNA, 25 bp, Probe Sequence
ttttgtacacactttatagtccata

SEQ ID NO: 311586 - DNA, 25 bp, Probe Sequence
ttttaaaccttttttcagcagatat

SEQ ID NO: 311587 - DNA, 25 bp, Probe Sequence
ttttcaaaacatctttccagacatt

SEQ ID NO: 311588 - DNA, 25 bp, Probe Sequence
ttttaatgacctcttggctcacata

SEQ ID NO: 311589 - DNA, 25 bp, Probe Sequence
ttttaagccaatccatgtgcccaca

SEQ ID NO: 311590 - DNA, 25 bp, Probe Sequence
ttttggcactgctcacagagcccac

SEQ ID NO: 311591 - DNA, 25 bp, Probe Sequence
ttttcagcaggttccagtgcctgac

SEQ ID NO: 311592 - DNA, 25 bp, Probe Sequence
ttttactgttacctgatcaatgaca

SEQ ID NO: 311593 - DNA, 25 bp, Probe Sequence
ttatttcattttcctacaccactga

SEQ ID NO: 311594 - DNA, 25 bp, Probe Sequence
ttttacattctgtttactgccacaa

SEQ ID NO: 311595 - DNA, 25 bp, Probe Sequence
ttattaaagtgttttgatccacaaa

SEQ ID NO: 311596 - DNA, 25 bp, Probe Sequence
ttttctaatagttcaatgtacacaa

SEQ ID NO: 311597 - DNA, 25 bp, Probe Sequence
ttttgctttagcatccttactctca

SEQ ID NO: 311598 - DNA, 25 bp, Probe Sequence
ttttgctttagcatccttactctca

SEQ ID NO: 311599 - DNA, 25 bp, Probe Sequence
ttttgctttagcatccttactctca

SEQ ID NO: 311600 - DNA, 25 bp, Probe Sequence
ttttgtttacatcccttaatcatga

SEQ ID NO: 311601 - DNA, 25 bp, Probe Sequence
ttttgttgtgtaactcttattgcaa

SEQ ID NO: 311602 - DNA, 25 bp, Probe Sequence
tttttccagttagtcttcttcaagg

SEQ ID NO: 311603 - DNA, 25 bp, Probe Sequence
tttttctcaattattctattgcaat

SEQ ID NO: 311604 - DNA, 25 bp, Probe Sequence
tttttcttcatgatattctatacaa

SEQ ID NO: 311605 - DNA, 25 bp, Probe Sequence
ttttatttctgtttgtcgataagaa

SEQ ID NO: 311606 - DNA, 25 bp, Probe Sequence
ttttagtttttgtcatagacataaa

SEQ ID NO: 311607 - DNA, 25 bp, Probe Sequence
ttttggtacttgaactaatattaat

SEQ ID NO: 311608 - DNA, 25 bp, Probe Sequence
ttttagtctttatcattctatgtta

SEQ ID NO: 311609 - DNA, 25 bp, Probe Sequence
ttttgcagtttattactgtcagcag

SEQ ID NO: 311610 - DNA, 25 bp, Probe Sequence
ttttcagtttgaattctgtagaaca

SEQ ID NO: 311611 - DNA, 25 bp, Probe Sequence
ttttgagcttctcattgtgtagaat

SEQ ID NO: 311612 - DNA, 25 bp, Probe Sequence
ttgtagtgggtggtttgtaaaactg

SEQ ID NO: 311613 - DNA, 25 bp, Probe Sequence
ttggatggggttgtataaataattt

SEQ ID NO: 311614 - DNA, 25 bp, Probe Sequence
ttttgggccttgctaaattgattga

SEQ ID NO: 311615 - DNA, 25 bp, Probe Sequence
ttttggtccttgcaacagtttgctg

SEQ ID NO: 311616 - DNA, 25 bp, Probe Sequence
ttttctaccttggaactgtattaga

SEQ ID NO: 311617 - DNA, 25 bp, Probe Sequence
ttttctaccttgaggtcttttgaca

SEQ ID NO: 311618 - DNA, 25 bp, Probe Sequence
ttttcaaccaagtggtttgtctaat

SEQ ID NO: 311619 - DNA, 25 bp, Probe Sequence
ttttccagaccttctggtttctcta

SEQ ID NO: 311620 - DNA, 25 bp, Probe Sequence
ttttaaacctactgtctctgtcata

SEQ ID NO: 311621 - DNA, 25 bp, Probe Sequence
ttttcaaaaccactattcttctaat

SEQ ID NO: 311622 - DNA, 25 bp, Probe Sequence
ttttctgtaaacgttctcttctact

SEQ ID NO: 311623 - DNA, 25 bp, Probe Sequence
ttttctggcaaaggccttcctgcat

SEQ ID NO: 311624 - DNA, 25 bp, Probe Sequence
ttttctggaatgtgctcttctggaa

SEQ ID NO: 311625 - DNA, 25 bp, Probe Sequence
ttttccgcagacttctttctgcaaa

SEQ ID NO: 311626 - DNA, 25 bp, Probe Sequence
tttttcacagacttgccttacacag

SEQ ID NO: 311627 - DNA, 25 bp, Probe Sequence
tttttctactcactggtatcccagg

SEQ ID NO: 311628 - DNA, 25 bp, Probe Sequence
tttttctaccttggaactgtattag

SEQ ID NO: 311629 - DNA, 25 bp, Probe Sequence
tttttctaccttggaactgtattag

SEQ ID NO: 311630 - DNA, 25 bp, Probe Sequence
tttttttctctcccaactggagcta

SEQ ID NO: 311631 - DNA, 25 bp, Probe Sequence
ttttttattgctccgcatactgaga

SEQ ID NO: 311632 - DNA, 25 bp, Probe Sequence
tttttctcttctccagtaataaaca

SEQ ID NO: 311633 - DNA, 25 bp, Probe Sequence
ttttctggtactctgtgaaagaaga

SEQ ID NO: 311634 - DNA, 25 bp, Probe Sequence
ttttctgagcatacctggaaaatgc

SEQ ID NO: 311635 - DNA, 25 bp, Probe Sequence
ttttctcagtggtctagaaaatcag

SEQ ID NO: 311636 - DNA, 25 bp, Probe Sequence
ttttcttgtggggaggttacagagg

SEQ ID NO: 311637 - DNA, 25 bp, Probe Sequence
ttttcacatgtggggaggttaatct

SEQ ID NO: 311638 - DNA, 25 bp, Probe Sequence
ttctttcatgtcaggcgttaaactg

SEQ ID NO: 311639 - DNA, 25 bp, Probe Sequence
ttatattgcagtatcctttaaaagc

SEQ ID NO: 311640 - DNA, 25 bp, Probe Sequence
ttattccgatagtacttttccacca

SEQ ID NO: 311641 - DNA, 25 bp, Probe Sequence
ttttctttattagctttctcctcat

SEQ ID NO: 311642 - DNA, 25 bp, Probe Sequence
ttttctttttgtgcattgtcctcat

SEQ ID NO: 311643 - DNA, 25 bp, Probe Sequence
ttttcattttggatattctcctgtt

SEQ ID NO: 311644 - DNA, 25 bp, Probe Sequence
ttttttcagtcagttttgctcctgg

SEQ ID NO: 311645 - DNA, 25 bp, Probe Sequence
ttttattcaatccatattttctctg

SEQ ID NO: 311646 - DNA, 25 bp, Probe Sequence
ttatttggagaccacattttcttaa

SEQ ID NO: 311647 - DNA, 25 bp, Probe Sequence
ttgtttttggcaccttacttgacca

SEQ ID NO: 311648 - DNA, 25 bp, Probe Sequence
tttttttgatgactttcactgtaaa

SEQ ID NO: 311649 - DNA, 25 bp, Probe Sequence
ttttctgttgacccttcatctgaaa

SEQ ID NO: 311650 - DNA, 25 bp, Probe Sequence
ttttgtgctgtggcctttgctaaaa

SEQ ID NO: 311651 - DNA, 25 bp, Probe Sequence
tttttctgtctcgttgatctaatat

SEQ ID NO: 311652 - DNA, 25 bp, Probe Sequence
ttttcttgtcttattgcataagcta

SEQ ID NO: 311653 - DNA, 25 bp, Probe Sequence
ttttctccccttaccataatggatg

SEQ ID NO: 311654 - DNA, 25 bp, Probe Sequence
ttttacacccctacaatattatcat

SEQ ID NO: 311655 - DNA, 25 bp, Probe Sequence
ttttagtccctgttcagagataatt

SEQ ID NO: 311656 - DNA, 25 bp, Probe Sequence
ttttattccttgtgaggcgacataa

SEQ ID NO: 311657 - DNA, 25 bp, Probe Sequence
ttttttcctgtgtgtaagcaataag

SEQ ID NO: 311658 - DNA, 25 bp, Probe Sequence
ttttttccatatctgtgagaaataa

SEQ ID NO: 311659 - DNA, 25 bp, Probe Sequence
ttttttccttggtgcgacactgtgc

SEQ ID NO: 311660 - DNA, 25 bp, Probe Sequence
tttttctttttatgccacacagtgc

SEQ ID NO: 311661 - DNA, 25 bp, Probe Sequence
ttttctgttttttaaacacctgcat

SEQ ID NO: 311662 - DNA, 25 bp, Probe Sequence
ttttctactgttcgtaaattcctat

SEQ ID NO: 311663 - DNA, 25 bp, Probe Sequence
ttttgtatcttcagtataatgggct

SEQ ID NO: 311664 - DNA, 25 bp, Probe Sequence
ttttatatgttcagttgtttatgta

SEQ ID NO: 311665 - DNA, 25 bp, Probe Sequence
ttttccagtcacaagttgtttaatt

SEQ ID NO: 311666 - DNA, 25 bp, Probe Sequence
ttttccatgaaaacgttttattgtg

SEQ ID NO: 311667 - DNA, 25 bp, Probe Sequence
ttttgcctagaatcctgttttcttc

SEQ ID NO: 311668 - DNA, 25 bp, Probe Sequence
ttttcctggatatctgtgtattttc

SEQ ID NO: 311669 - DNA, 25 bp, Probe Sequence
tttttcatgcgttcccgtatatttg

SEQ ID NO: 311670 - DNA, 25 bp, Probe Sequence
ttttctatgtgattgtgccgtcatt

SEQ ID NO: 311671 - DNA, 25 bp, Probe Sequence
ttttcttgagaattctcgtcttcca

SEQ ID NO: 311672 - DNA, 25 bp, Probe Sequence
ttttcagtaaagtctcgttacgcca

SEQ ID NO: 311673 - DNA, 25 bp, Probe Sequence
ttttcagtaaagtctcgttacgcca

SEQ ID NO: 311674 - DNA, 25 bp, Probe Sequence
ttttagtatcaacctgctgtatatt

SEQ ID NO: 311675 - DNA, 25 bp, Probe Sequence
ttctctaagaaacagcttgaaagct

SEQ ID NO: 311676 - DNA, 25 bp, Probe Sequence
ttgctttaggaacagctcaagaacc

SEQ ID NO: 311677 - DNA, 25 bp, Probe Sequence
ttttatcgctaaagagaaaacactc

SEQ ID NO: 311678 - DNA, 25 bp, Probe Sequence
ttttcatcttaatctgatattcccc

SEQ ID NO: 311679 - DNA, 25 bp, Probe Sequence
ttttcactggcttctctatattccc

SEQ ID NO: 311680 - DNA, 25 bp, Probe Sequence
ttttcacatgggtttttctccaagt

SEQ ID NO: 311681 - DNA, 25 bp, Probe Sequence
ttttcaatgaagtttctgtattaaa

SEQ ID NO: 311682 - DNA, 25 bp, Probe Sequence
ttttcaatgacctttctgcagaaca

SEQ ID NO: 311683 - DNA, 25 bp, Probe Sequence
ttttcacgacctactcatctgacaa

SEQ ID NO: 311684 - DNA, 25 bp, Probe Sequence
ttttacggcaatatcatcaccacac

SEQ ID NO: 311685 - DNA, 25 bp, Probe Sequence
ttttacgtggccagatcctcatagc

SEQ ID NO: 311686 - DNA, 25 bp, Probe Sequence
ttttcagcgttcatacccagctagc

SEQ ID NO: 311687 - DNA, 25 bp, Probe Sequence
ttttcacctctagttctggatgtac

SEQ ID NO: 311688 - DNA, 25 bp, Probe Sequence
ttttcacctcttggttgggctggag

SEQ ID NO: 311689 - DNA, 25 bp, Probe Sequence
ttttcacctcttggttgggctggag

SEQ ID NO: 311690 - DNA, 25 bp, Probe Sequence
ttttactcttctgttagctctggac

SEQ ID NO: 311691 - DNA, 25 bp, Probe Sequence
ttttattctaccacggctggagagt

SEQ ID NO: 311692 - DNA, 25 bp, Probe Sequence
ttttcatcctactccacgtgggagt

SEQ ID NO: 311693 - DNA, 25 bp, Probe Sequence
ttttcatccttattctcaccatgag

SEQ ID NO: 311694 - DNA, 25 bp, Probe Sequence
ttttacctcgttgcactgctgagag

SEQ ID NO: 311695 - DNA, 25 bp, Probe Sequence
tttttcttctgtcacaatgctaagt

SEQ ID NO: 311696 - DNA, 25 bp, Probe Sequence
ttttctgtcctgtgcacaaaaagtt

SEQ ID NO: 311697 - DNA, 25 bp, Probe Sequence
ttttcttctctctataataaatcgt

SEQ ID NO: 311698 - DNA, 25 bp, Probe Sequence
ttttctctaactcagaaacatcagt

SEQ ID NO: 311699 - DNA, 25 bp, Probe Sequence
ttttcctcatacaagtaaacacaga

SEQ ID NO: 311700 - DNA, 25 bp, Probe Sequence
ttttcctctggacataagacataac

SEQ ID NO: 311701 - DNA, 25 bp, Probe Sequence
ttttttctgaatcataattaaactt

SEQ ID NO: 311702 - DNA, 25 bp, Probe Sequence
ttatttttagtgctgttttaacaat

SEQ ID NO: 311703 - DNA, 25 bp, Probe Sequence
ttttctattaatcttttgtcaactt

SEQ ID NO: 311704 - DNA, 25 bp, Probe Sequence
ttttctcattaccattttggaccac

SEQ ID NO: 311705 - DNA, 25 bp, Probe Sequence
ttttcttttgctcatcttagaccac

SEQ ID NO: 311706 - DNA, 25 bp, Probe Sequence
ttttgttattgatatctcggataca

SEQ ID NO: 311707 - DNA, 25 bp, Probe Sequence
ttttgttattgatatctcggataca

SEQ ID NO: 311708 - DNA, 25 bp, Probe Sequence
ttttgttctttacatcaagaaattt

SEQ ID NO: 311709 - DNA, 25 bp, Probe Sequence
ttttttctgtttaatgcagcaaaat

SEQ ID NO: 311710 - DNA, 25 bp, Probe Sequence
ttttcctgctgtatccagaagaaat

SEQ ID NO: 311711 - DNA, 25 bp, Probe Sequence
ttttctttgcataatccagggaatc

SEQ ID NO: 311712 - DNA, 25 bp, Probe Sequence
ttatacatcttttaacactgtgaat

SEQ ID NO: 311713 - DNA, 25 bp, Probe Sequence
ttattccttcactcccattaattaa

SEQ ID NO: 311714 - DNA, 25 bp, Probe Sequence
ttttatttccaactccattatacca

SEQ ID NO: 311715 - DNA, 25 bp, Probe Sequence
ttttattaccaagcgcttctttctg

SEQ ID NO: 311716 - DNA, 25 bp, Probe Sequence
ttttattccttacagcttccttgta

SEQ ID NO: 311717 - DNA, 25 bp, Probe Sequence
ttttatggccctatgatctatcctt

SEQ ID NO: 311718 - DNA, 25 bp, Probe Sequence
ttttcatgcctgatttacttcactt

SEQ ID NO: 311719 - DNA, 25 bp, Probe Sequence
ttttgctggtatattcagtgctgca

SEQ ID NO: 311720 - DNA, 25 bp, Probe Sequence
ttatttggatgtatatcagtggaga

SEQ ID NO: 311721 - DNA, 25 bp, Probe Sequence
atgaacaggtatcctattgtctaat

SEQ ID NO: 311722 - DNA, 25 bp, Probe Sequence
ttttccggctggaaccatggagggt

SEQ ID NO: 311723 - DNA, 25 bp, Probe Sequence
ttttgcccgtggagctcatggagac

SEQ ID NO: 311724 - DNA, 25 bp, Probe Sequence
ttttgcatccagtgacgtctgcttg

SEQ ID NO: 311725 - DNA, 25 bp, Probe Sequence
ttatgtgacctgtcagatcgcctgt

SEQ ID NO: 311726 - DNA, 25 bp, Probe Sequence
ttatggaatcagtcgttggcacctt

SEQ ID NO: 311727 - DNA, 25 bp, Probe Sequence
ttatggaatcagtcgttggcacctt

SEQ ID NO: 311728 - DNA, 25 bp, Probe Sequence
ttattgtaaaagtctggcctctttt

SEQ ID NO: 311729 - DNA, 25 bp, Probe Sequence
ttttgtacgcaattctcgattcttt

SEQ ID NO: 311730 - DNA, 25 bp, Probe Sequence
ttttgctacgcaattctcgattctt

SEQ ID NO: 311731 - DNA, 25 bp, Probe Sequence
ttttgcattccaatttcatgttgat

SEQ ID NO: 311732 - DNA, 25 bp, Probe Sequence
ttttgttccaacagcatgtattatc

SEQ ID NO: 311733 - DNA, 25 bp, Probe Sequence
ttctggttccagacaataccttccc

SEQ ID NO: 311734 - DNA, 25 bp, Probe Sequence
ttttattgccacaactaacctcctc

SEQ ID NO: 311735 - DNA, 25 bp, Probe Sequence
ttttttgctacaatcttgacccctt

SEQ ID NO: 311736 - DNA, 25 bp, Probe Sequence
ttttttgaacaccattgtccaatct

SEQ ID NO: 311737 - DNA, 25 bp, Probe Sequence
ttttgtctggttcctttgccaacat

SEQ ID NO: 311738 - DNA, 25 bp, Probe Sequence
ttttcactgtttcctattaatcttc

SEQ ID NO: 311739 - DNA, 25 bp, Probe Sequence
ttttcattgtttcagttatctatcc

SEQ ID NO: 311740 - DNA, 25 bp, Probe Sequence
ttttctgtgtccttaagtacttcct

SEQ ID NO: 311741 - DNA, 25 bp, Probe Sequence
ttttccttccactaagtcaaatcct

SEQ ID NO: 311742 - DNA, 25 bp, Probe Sequence
ttttccaagcaacctcactgaaacc

SEQ ID NO: 311743 - DNA, 25 bp, Probe Sequence
ttttccctcaagcctaccaaagagc

SEQ ID NO: 311744 - DNA, 25 bp, Probe Sequence
ttctcccccaaagtacaataaagct

SEQ ID NO: 311745 - DNA, 25 bp, Probe Sequence
ttccccgcctaatagtattcaactc

SEQ ID NO: 311746 - DNA, 25 bp, Probe Sequence
ttacccgaaaaacaaccacactgct

SEQ ID NO: 311747 - DNA, 25 bp, Probe Sequence
ttttccttaaaacgcgcacacaact

SEQ ID NO: 311748 - DNA, 25 bp, Probe Sequence
ttttcttcataaaatcctcaaaact

SEQ ID NO: 311749 - DNA, 25 bp, Probe Sequence
ttttctcttccaagtgcccagaaca

SEQ ID NO: 311750 - DNA, 25 bp, Probe Sequence
tttttttgagaagcgccagaaacga

SEQ ID NO: 311751 - DNA, 25 bp, Probe Sequence
ttttgttgggacagccacgaaacca

SEQ ID NO: 311752 - DNA, 25 bp, Probe Sequence
ttttgttggatgtactccaggaaat

SEQ ID NO: 311753 - DNA, 25 bp, Probe Sequence
ttatattgggatgacctgaagagaa

SEQ ID NO: 311754 - DNA, 25 bp, Probe Sequence
ttattagaagagtcccatgaaaggt

SEQ ID NO: 311755 - DNA, 25 bp, Probe Sequence
ttatgcagggtaatccagctaaagg

SEQ ID NO: 311756 - DNA, 25 bp, Probe Sequence
ttatcgtcgtatactgagtacgaaa

SEQ ID NO: 311757 - DNA, 25 bp, Probe Sequence
ttttgattgtatactgagtgtccaa

SEQ ID NO: 311758 - DNA, 25 bp, Probe Sequence
ttttcatcatgtctatagttcctga

SEQ ID NO: 311759 - DNA, 25 bp, Probe Sequence
ttttagctgtgacacaactgtgtga

SEQ ID NO: 311760 - DNA, 25 bp, Probe Sequence
ttctccagcttaccctagggtgacc

SEQ ID NO: 311761 - DNA, 25 bp, Probe Sequence
ttctccagcttaccctagggtgacc

SEQ ID NO: 311762 - DNA, 25 bp, Probe Sequence
ttctccagcttaccctagggtgacc

SEQ ID NO: 311763 - DNA, 25 bp, Probe Sequence
ttccaccttacgctcgtagtacatt

SEQ ID NO: 311764 - DNA, 25 bp, Probe Sequence
ttcccgaaacacacattggtactaa

SEQ ID NO: 311765 - DNA, 25 bp, Probe Sequence
ttttccgaacacacttctttctcaa

SEQ ID NO: 311766 - DNA, 25 bp, Probe Sequence
ttttctatgaactagtctacttctt

SEQ ID NO: 311767 - DNA, 25 bp, Probe Sequence
ttttcctgacactctcaactgtgca

SEQ ID NO: 311768 - DNA, 25 bp, Probe Sequence
ttttcactccagtttaatctgtgat

SEQ ID NO: 311769 - DNA, 25 bp, Probe Sequence
ttttcacctcatttataatccagta

SEQ ID NO: 311770 - DNA, 25 bp, Probe Sequence
ttttctgcccattgataaacctctc

SEQ ID NO: 311771 - DNA, 25 bp, Probe Sequence
ttgctaccccgataaactcacaggt

SEQ ID NO: 311772 - DNA, 25 bp, Probe Sequence
ttgtaccacccaatgaaaaaaggat

SEQ ID NO: 311773 - DNA, 25 bp, Probe Sequence
ttacccccgcaagacatacacagga

SEQ ID NO: 311774 - DNA, 25 bp, Probe Sequence
ttccgagctacaccaggaaaaagga

SEQ ID NO: 311775 - DNA, 25 bp, Probe Sequence
ttttggtatcccagaacatgacaaa

SEQ ID NO: 311776 - DNA, 25 bp, Probe Sequence
ttttgacctcccatagaagacaccc

SEQ ID NO: 311777 - DNA, 25 bp, Probe Sequence
ttttgaccaaccgcagcaatgcaca

SEQ ID NO: 311778 - DNA, 25 bp, Probe Sequence
ttttaccccacgaagacatcaagat

SEQ ID NO: 311779 - DNA, 25 bp, Probe Sequence
ttttaacctcctaagtatcaagtat

SEQ ID NO: 311780 - DNA, 25 bp, Probe Sequence
ttaaagtccctcaatcagttgcaga

SEQ ID NO: 311781 - DNA, 25 bp, Probe Sequence
ttaggtggcgtgtttcagcttggca

SEQ ID NO: 311782 - DNA, 25 bp, Probe Sequence
ttagtttctgctctttcattgggtc

SEQ ID NO: 311783 - DNA, 25 bp, Probe Sequence
ttttggttgcagttcattttggaga

SEQ ID NO: 311784 - DNA, 25 bp, Probe Sequence
ttttgacttctactttactggctga

SEQ ID NO: 311785 - DNA, 25 bp, Probe Sequence
ttttatcttgtacggtcactgttgg

SEQ ID NO: 311786 - DNA, 25 bp, Probe Sequence
ttttcatgcgttcccgtatatttgt

SEQ ID NO: 311787 - DNA, 25 bp, Probe Sequence
ttttatccttgtgggtcagatttca

SEQ ID NO: 311788 - DNA, 25 bp, Probe Sequence
ttgtggtacttggaggctcaacctc

SEQ ID NO: 311789 - DNA, 25 bp, Probe Sequence
ttagacataactgaggccaacctgg

SEQ ID NO: 311790 - DNA, 25 bp, Probe Sequence
ttagtaaccggatgtccaccatgac

SEQ ID NO: 311791 - DNA, 25 bp, Probe Sequence
ttagctaacccgagtccagttctca

SEQ ID NO: 311792 - DNA, 25 bp, Probe Sequence
ttagaaacccttgtcagagcccata

SEQ ID NO: 311793 - DNA, 25 bp, Probe Sequence
ttttaactttatgaccagcctaaat

SEQ ID NO: 311794 - DNA, 25 bp, Probe Sequence
ttttaacatctacttacaagccaaa

SEQ ID NO: 311795 - DNA, 25 bp, Probe Sequence
ttttccacacgcattaatagtccca

SEQ ID NO: 311796 - DNA, 25 bp, Probe Sequence
ttttcccattgcaataaaagctcca

SEQ ID NO: 311797 - DNA, 25 bp, Probe Sequence
ttttgtcctctgtagataaacccat

SEQ ID NO: 311798 - DNA, 25 bp, Probe Sequence
ttttgtcttcttgataatagtcatt

SEQ ID NO: 311799 - DNA, 25 bp, Probe Sequence
ttttgtcttctgttgtccacagcca

SEQ ID NO: 311800 - DNA, 25 bp, Probe Sequence
ttttgagtgttggtgttaagcatga

SEQ ID NO: 311801 - DNA, 25 bp, Probe Sequence
ttttcactaatctgttgagagctaa

SEQ ID NO: 311802 - DNA, 25 bp, Probe Sequence
ttttgcctactctgtggtgaataat

SEQ ID NO: 311803 - DNA, 25 bp, Probe Sequence
ttttgccaacacctgctggtcagat

SEQ ID NO: 311804 - DNA, 25 bp, Probe Sequence
ttttcacaagcactgttgactctgc

SEQ ID NO: 311805 - DNA, 25 bp, Probe Sequence
ttttaaatgcagcatccacttcata

SEQ ID NO: 311806 - DNA, 25 bp, Probe Sequence
ttttataatgcacatattcccaaca

SEQ ID NO: 311807 - DNA, 25 bp, Probe Sequence
ttattaaatcgtaattccctctagc

SEQ ID NO: 311808 - DNA, 25 bp, Probe Sequence
ttttacattcatcaatatccctctt

SEQ ID NO: 311809 - DNA, 25 bp, Probe Sequence
ttttgtttcttctatactgccttat

SEQ ID NO: 311810 - DNA, 25 bp, Probe Sequence
ttttatattgttttgactgcctttt

SEQ ID NO: 311811 - DNA, 25 bp, Probe Sequence
ttatttatttatgtacctttgttat

SEQ ID NO: 311812 - DNA, 25 bp, Probe Sequence
ttattttcctcatgaaccctgtttt

SEQ ID NO: 311813 - DNA, 25 bp, Probe Sequence
ttttctcccaaatgacccagatgtt

SEQ ID NO: 311814 - DNA, 25 bp, Probe Sequence
ttatttctactaaggacccagagca

SEQ ID NO: 311815 - DNA, 25 bp, Probe Sequence
ttttcctctctaagagttctcagga

SEQ ID NO: 311816 - DNA, 25 bp, Probe Sequence
ttttcctgtccttgggtctgcaaga

SEQ ID NO: 311817 - DNA, 25 bp, Probe Sequence
ttttccagtcttccggtctgacaaa

SEQ ID NO: 311818 - DNA, 25 bp, Probe Sequence
ttattccagttcatgccgttatcga

SEQ ID NO: 311819 - DNA, 25 bp, Probe Sequence
ttgattaaacctagacgcattagga

SEQ ID NO: 311820 - DNA, 25 bp, Probe Sequence
ttattattacttggaccttggtcgt

SEQ ID NO: 311821 - DNA, 25 bp, Probe Sequence
ttatgtatttttgtgcactaggcgc

SEQ ID NO: 311822 - DNA, 25 bp, Probe Sequence
ttatgacatgaggttactcctagcc

SEQ ID NO: 311823 - DNA, 25 bp, Probe Sequence
ttatggcatgagggacctctcggga

SEQ ID NO: 311824 - DNA, 25 bp, Probe Sequence
ttatcgataccgtcgacctcgatga

SEQ ID NO: 311825 - DNA, 25 bp, Probe Sequence
ttatcgtgagctctcggtgcacagt

SEQ ID NO: 311826 - DNA, 25 bp, Probe Sequence
ttttgtgtggccttgggccagcttc

SEQ ID NO: 311827 - DNA, 25 bp, Probe Sequence
ttgctttaggcctggagactttcat

SEQ ID NO: 311828 - DNA, 25 bp, Probe Sequence
ttcatttttacaagggacgttatat

SEQ ID NO: 311829 - DNA, 25 bp, Probe Sequence
ttatttctcatataaaactgttaga

SEQ ID NO: 311830 - DNA, 25 bp, Probe Sequence
ttttcttgttcctattactgtataa

SEQ ID NO: 311831 - DNA, 25 bp, Probe Sequence
ttttcttttgccttgtactatcttg

SEQ ID NO: 311832 - DNA, 25 bp, Probe Sequence
ttatttgttgtcctttactactgta

SEQ ID NO: 311833 - DNA, 25 bp, Probe Sequence
ttttctgctggtggatttacatatt

SEQ ID NO: 311834 - DNA, 25 bp, Probe Sequence
ttatttgtggccgagtgtaacaacc

SEQ ID NO: 311835 - DNA, 25 bp, Probe Sequence
ttcatttcagcgtggtaaaaaccga

SEQ ID NO: 311836 - DNA, 25 bp, Probe Sequence
ttatttgcagcctatgagtacacat

SEQ ID NO: 311837 - DNA, 25 bp, Probe Sequence
ttatttccctgatgaccagaagttt

SEQ ID NO: 311838 - DNA, 25 bp, Probe Sequence
ttatccaccgtgaaaaagaagcttc

SEQ ID NO: 311839 - DNA, 25 bp, Probe Sequence
ttatccaccgtgaaaaagaagcttc

SEQ ID NO: 311840 - DNA, 25 bp, Probe Sequence
ttaccccccaaataaattgtcacat

SEQ ID NO: 311841 - DNA, 25 bp, Probe Sequence
ttacccccaccactaagagaataca

SEQ ID NO: 311842 - DNA, 25 bp, Probe Sequence
ttacctctcccaaggagggtacaca

SEQ ID NO: 311843 - DNA, 25 bp, Probe Sequence
ttagatcttcccgtggggtaagcca

SEQ ID NO: 311844 - DNA, 25 bp, Probe Sequence
ttatcttgttccctggaggatccag

SEQ ID NO: 311845 - DNA, 25 bp, Probe Sequence
ttcatattggctaggtagggtcacc

SEQ ID NO: 311846 - DNA, 25 bp, Probe Sequence
ttctaccctttgccagggcaaccat

SEQ ID NO: 311847 - DNA, 25 bp, Probe Sequence
ttctaccttgtatcaggggttataa

SEQ ID NO: 311848 - DNA, 25 bp, Probe Sequence
ttacccattgactcaaggggacata

SEQ ID NO: 311849 - DNA, 25 bp, Probe Sequence
ttatcccattgaaaagaccgagcct

SEQ ID NO: 311850 - DNA, 25 bp, Probe Sequence
ttcaagccgtgggaggagcggaccg

SEQ ID NO: 311851 - DNA, 25 bp, Probe Sequence
ttacagccggtcaagaagcaggagc

SEQ ID NO: 311852 - DNA, 25 bp, Probe Sequence
ttatcattcagggttcaatcagaga

SEQ ID NO: 311853 - DNA, 25 bp, Probe Sequence
ttgcaggatgcaaggttaatatgca

SEQ ID NO: 311854 - DNA, 25 bp, Probe Sequence
ttatggagcacaatgtaagacaaaa

SEQ ID NO: 311855 - DNA, 25 bp, Probe Sequence
ttaggtgacatgatagacaagtttg

SEQ ID NO: 311856 - DNA, 25 bp, Probe Sequence
ttagatgtgccaataaccaagttta

SEQ ID NO: 311857 - DNA, 25 bp, Probe Sequence
ttaggctccaagaaacactgtttaa

SEQ ID NO: 311858 - DNA, 25 bp, Probe Sequence
ttatggaaaatgtcaacctttgtaa

SEQ ID NO: 311859 - DNA, 25 bp, Probe Sequence
ttaaaatctattagacctcttccat

SEQ ID NO: 311860 - DNA, 25 bp, Probe Sequence
ttttggatgtagagaccgcttcatt

SEQ ID NO: 311861 - DNA, 25 bp, Probe Sequence
ttgtttagtaaatcccttcagtatt

SEQ ID NO: 311862 - DNA, 25 bp, Probe Sequence
ttgttaaatcagttacccgtagtag

SEQ ID NO: 311863 - DNA, 25 bp, Probe Sequence
ttattcagaaggatgtcccgtggaa

SEQ ID NO: 311864 - DNA, 25 bp, Probe Sequence
ttatttgtcagtgttggtagtggaa

SEQ ID NO: 311865 - DNA, 25 bp, Probe Sequence
ttttattgcagatgtctttagaggc

SEQ ID NO: 311866 - DNA, 25 bp, Probe Sequence
ttttattcagcatcctttatctgtg

SEQ ID NO: 311867 - DNA, 25 bp, Probe Sequence
ttttatatatgcactttgctgtttg

SEQ ID NO: 311868 - DNA, 25 bp, Probe Sequence
ttttattgcatgcactgtgaccttg

SEQ ID NO: 311869 - DNA, 25 bp, Probe Sequence
ttttgatacatggactcagcccttc

SEQ ID NO: 311870 - DNA, 25 bp, Probe Sequence
ttttgatatcatacccagcattata

SEQ ID NO: 311871 - DNA, 25 bp, Probe Sequence
ttttcttcttcacaattgatggtgc

SEQ ID NO: 311872 - DNA, 25 bp, Probe Sequence
ttttgtatttggcaactgtgggcaa

SEQ ID NO: 311873 - DNA, 25 bp, Probe Sequence
ttttgtgccttacaaaaggcgcaag

SEQ ID NO: 311874 - DNA, 25 bp, Probe Sequence
ttttggcctctactaaagagagcag

SEQ ID NO: 311875 - DNA, 25 bp, Probe Sequence
ttttggcccgaatgagggagcctcc

SEQ ID NO: 311876 - DNA, 25 bp, Probe Sequence
ttttgggagctgtgggcgcaacccc

SEQ ID NO: 311877 - DNA, 25 bp, Probe Sequence
ttttggggcttaacgcgatctgctc

SEQ ID NO: 311878 - DNA, 25 bp, Probe Sequence
ttttgaggggttcccatcatccctc

SEQ ID NO: 311879 - DNA, 25 bp, Probe Sequence
ttttaggagtctgaccctccacatc

SEQ ID NO: 311880 - DNA, 25 bp, Probe Sequence
ttttggatacaaaagctttcctcat

SEQ ID NO: 311881 - DNA, 25 bp, Probe Sequence
ttttggacttgttcatgtcccctct

SEQ ID NO: 311882 - DNA, 25 bp, Probe Sequence
ttttggacttgttcatgtcccctct

SEQ ID NO: 311883 - DNA, 25 bp, Probe Sequence
ttttaattggctttgtgcctcctgc

SEQ ID NO: 311884 - DNA, 25 bp, Probe Sequence
ttttatgattacatcttgtccccct

SEQ ID NO: 311885 - DNA, 25 bp, Probe Sequence
ttttatatgtaaatgctgtggacca

SEQ ID NO: 311886 - DNA, 25 bp, Probe Sequence
ttttcactttgaagatgggagccag

SEQ ID NO: 311887 - DNA, 25 bp, Probe Sequence
ttttcactgttgacaagcgaggcaa

SEQ ID NO: 311888 - DNA, 25 bp, Probe Sequence
ttttcaatcttcgacagctgggctg

SEQ ID NO: 311889 - DNA, 25 bp, Probe Sequence
ttttgcaactatgacggtggggatt

SEQ ID NO: 311890 - DNA, 25 bp, Probe Sequence
ttttccatgtatgaggagggggaaa

SEQ ID NO: 311891 - DNA, 25 bp, Probe Sequence
ttttatcttaagtttggggtgaatg

SEQ ID NO: 311892 - DNA, 25 bp, Probe Sequence
ttttgctttatagtttggctgggga

SEQ ID NO: 311893 - DNA, 25 bp, Probe Sequence
ttcttttttactttgcacatcagtg

SEQ ID NO: 311894 - DNA, 25 bp, Probe Sequence
ttaaggtttagctccacatcatgct

SEQ ID NO: 311895 - DNA, 25 bp, Probe Sequence
ttttggttaagctttgacactggaa

SEQ ID NO: 311896 - DNA, 25 bp, Probe Sequence
ttcttagctgtaacttaactattaa

SEQ ID NO: 311897 - DNA, 25 bp, Probe Sequence
ttttatgagtactttttctttgaag

SEQ ID NO: 311898 - DNA, 25 bp, Probe Sequence
ttttctgagctactcggactcttta

SEQ ID NO: 311899 - DNA, 25 bp, Probe Sequence
ttttctgatcagtttgcgagttttg

SEQ ID NO: 311900 - DNA, 25 bp, Probe Sequence
ttgtgtcgatatgttcggcttttca

SEQ ID NO: 311901 - DNA, 25 bp, Probe Sequence
ttttctgaagtctcagtgtctttca

SEQ ID NO: 311902 - DNA, 25 bp, Probe Sequence
ttttctcaattttctgtgctattta

SEQ ID NO: 311903 - DNA, 25 bp, Probe Sequence
ttttctatacttccattcttatatt

SEQ ID NO: 311904 - DNA, 25 bp, Probe Sequence
ttttctaatttggcacctcttgatg

SEQ ID NO: 311905 - DNA, 25 bp, Probe Sequence
ttttctacatcttactcctgttgat

SEQ ID NO: 311906 - DNA, 25 bp, Probe Sequence
ttacttagtagctactcccaaattg

SEQ ID NO: 311907 - DNA, 25 bp, Probe Sequence
ttacttttggtatcccagaacatga

SEQ ID NO: 311908 - DNA, 25 bp, Probe Sequence
ttgactctttcaactacccagtatt

SEQ ID NO: 311909 - DNA, 25 bp, Probe Sequence
ttatcttttaggtacctcaagcatt

SEQ ID NO: 311910 - DNA, 25 bp, Probe Sequence
ttttgattcttgattttcaagcttt

SEQ ID NO: 311911 - DNA, 25 bp, Probe Sequence
ttttatatttagattccaactagat

SEQ ID NO: 311912 - DNA, 25 bp, Probe Sequence
ttttaatcattaacttccacaaaga

SEQ ID NO: 311913 - DNA, 25 bp, Probe Sequence
ttttcattttcaacttccatccaag

SEQ ID NO: 311914 - DNA, 25 bp, Probe Sequence
ttttcatatatcaaattatttccaa

SEQ ID NO: 311915 - DNA, 25 bp, Probe Sequence
ttttctatagctactttatttaaca

SEQ ID NO: 311916 - DNA, 25 bp, Probe Sequence
ttttgtaagcagctgtttaaaacat

SEQ ID NO: 311917 - DNA, 25 bp, Probe Sequence
ttttgtagcacacttttcaaaaaca

SEQ ID NO: 311918 - DNA, 25 bp, Probe Sequence
ttttcttcacacagcttcttaaacc

SEQ ID NO: 311919 - DNA, 25 bp, Probe Sequence
ttttctatttcttgctccttagaaa

SEQ ID NO: 311920 - DNA, 25 bp, Probe Sequence
ttttcttttagctcctctgtggtga

SEQ ID NO: 311921 - DNA, 25 bp, Probe Sequence
ttattttcctaactccatcttagtg

SEQ ID NO: 311922 - DNA, 25 bp, Probe Sequence
ttttgccctgcctctaattatagtg

SEQ ID NO: 311923 - DNA, 25 bp, Probe Sequence
ttttggccattctcataccacagac

SEQ ID NO: 311924 - DNA, 25 bp, Probe Sequence
ttttggccattctcataccacagac

SEQ ID NO: 311925 - DNA, 25 bp, Probe Sequence
ttttagtcattcttcacaatcacga

SEQ ID NO: 311926 - DNA, 25 bp, Probe Sequence
ttttatgttctggtcaaatgcctga

SEQ ID NO: 311927 - DNA, 25 bp, Probe Sequence
ttttcagttcagttcattatccatc

SEQ ID NO: 311928 - DNA, 25 bp, Probe Sequence
ttttcatagtcgtattttgccaccg

SEQ ID NO: 311929 - DNA, 25 bp, Probe Sequence
ttttaacatcagtctgtctcacccc

SEQ ID NO: 311930 - DNA, 25 bp, Probe Sequence
ttttacagataaagctgctaactcc

SEQ ID NO: 311931 - DNA, 25 bp, Probe Sequence
ttttccactgagaaagctaagccct

SEQ ID NO: 311932 - DNA, 25 bp, Probe Sequence
ttttgtccatagcatcagttgatcc

SEQ ID NO: 311933 - DNA, 25 bp, Probe Sequence
ttttctcctgaggatgagattcaca

SEQ ID NO: 311934 - DNA, 25 bp, Probe Sequence
ttcttccacgatggtgcagtgtaac

SEQ ID NO: 311935 - DNA, 25 bp, Probe Sequence
ttttcaacctgtggcagagctgaag

SEQ ID NO: 311936 - DNA, 25 bp, Probe Sequence
ttttggcaccgggaagctcatcagg

SEQ ID NO: 311937 - DNA, 25 bp, Probe Sequence
ttattgctgcaactggcaaacctgc

SEQ ID NO: 311938 - DNA, 25 bp, Probe Sequence
ttatatcagctactgaaaccactgc

SEQ ID NO: 311939 - DNA, 25 bp, Probe Sequence
ttttcccaggagaagacacctctgg

SEQ ID NO: 311940 - DNA, 25 bp, Probe Sequence
ttttcacataggttagattctcatt

SEQ ID NO: 311941 - DNA, 25 bp, Probe Sequence
ttttcagcactccataaattctatt

SEQ ID NO: 311942 - DNA, 25 bp, Probe Sequence
ttttaatgtccaaaatccatttctt

SEQ ID NO: 311943 - DNA, 25 bp, Probe Sequence
ttttaatcattcaccccattacttc

SEQ ID NO: 311944 - DNA, 25 bp, Probe Sequence
ttttactctatacccccattatgta

SEQ ID NO: 311945 - DNA, 25 bp, Probe Sequence
ttttacattctgttccccagttaca

SEQ ID NO: 311946 - DNA, 25 bp, Probe Sequence
ttttaaatttctactccagtccaat

SEQ ID NO: 311947 - DNA, 25 bp, Probe Sequence
ttttccaaattctttactgtccaat

SEQ ID NO: 311948 - DNA, 25 bp, Probe Sequence
ttttccaatttcttattgcatatca

SEQ ID NO: 311949 - DNA, 25 bp, Probe Sequence
ttttctgttaatttaggcatataga

SEQ ID NO: 311950 - DNA, 25 bp, Probe Sequence
ttttctgttagatgtcatgccttgt

SEQ ID NO: 311951 - DNA, 25 bp, Probe Sequence
ttttctgtcttgtgaatgcacttga

SEQ ID NO: 311952 - DNA, 25 bp, Probe Sequence
ttttctgcttgttcttaatgctgtg

SEQ ID NO: 311953 - DNA, 25 bp, Probe Sequence
ttttctttgttgtctacatgtgtga

SEQ ID NO: 311954 - DNA, 25 bp, Probe Sequence
ttttctagctgttgtcaatctgggg

SEQ ID NO: 311955 - DNA, 25 bp, Probe Sequence
ttattctacttggtcagctttggga

SEQ ID NO: 311956 - DNA, 25 bp, Probe Sequence
ttttgtcaagtgatccctctcggac

SEQ ID NO: 311957 - DNA, 25 bp, Probe Sequence
ttttgaaagagttctcctcatagga

SEQ ID NO: 311958 - DNA, 25 bp, Probe Sequence
ttattgagcatctcttctccataag

SEQ ID NO: 311959 - DNA, 25 bp, Probe Sequence
ttttgcatcagcccttctggcagaa

SEQ ID NO: 311960 - DNA, 25 bp, Probe Sequence
ttttgcgcagctcattcttggaatc

SEQ ID NO: 311961 - DNA, 25 bp, Probe Sequence
ttttggcactgactactgggcattc

SEQ ID NO: 311962 - DNA, 25 bp, Probe Sequence
ttattaactgaccaccatggcctgc

SEQ ID NO: 311963 - DNA, 25 bp, Probe Sequence
ttattgaactaccagtgctccacca

SEQ ID NO: 311964 - DNA, 25 bp, Probe Sequence
ttttgagacctcagcttggcactca

SEQ ID NO: 311965 - DNA, 25 bp, Probe Sequence
ttttgaccacctggtgccagctata

SEQ ID NO: 311966 - DNA, 25 bp, Probe Sequence
ttttgccttcctggtgtaatcagta

SEQ ID NO: 311967 - DNA, 25 bp, Probe Sequence
ttttcacttcctcggcatgagtcag

SEQ ID NO: 311968 - DNA, 25 bp, Probe Sequence
ttataaatagccagccagcgtcacc

SEQ ID NO: 311969 - DNA, 25 bp, Probe Sequence
ttataacaggccatccatttttgta

SEQ ID NO: 311970 - DNA, 25 bp, Probe Sequence
ttattgtcgaccatccatttttctt

SEQ ID NO: 311971 - DNA, 25 bp, Probe Sequence
ttagttaaccactcattgccacact

SEQ ID NO: 311972 - DNA, 25 bp, Probe Sequence
ttactggaccccattcgaagcacat

SEQ ID NO: 311973 - DNA, 25 bp, Probe Sequence
ttactggagcccttcacttatgcag

SEQ ID NO: 311974 - DNA, 25 bp, Probe Sequence
ttattggagcctaattgttaggtag

SEQ ID NO: 311975 - DNA, 25 bp, Probe Sequence
ttttggatgccatttgattgtaata

SEQ ID NO: 311976 - DNA, 25 bp, Probe Sequence
ttttctgtgtactgattgctataat

SEQ ID NO: 311977 - DNA, 25 bp, Probe Sequence
ttttctggatatgccattctagatt

SEQ ID NO: 311978 - DNA, 25 bp, Probe Sequence
ttttcttcataaggcacatctcagc

SEQ ID NO: 311979 - DNA, 25 bp, Probe Sequence
ttttactatacagcataccacgcca

SEQ ID NO: 311980 - DNA, 25 bp, Probe Sequence
ttattcctgtggggctcaccccaaa

SEQ ID NO: 311981 - DNA, 25 bp, Probe Sequence
ttcttgcggtgggagttccccaact

SEQ ID NO: 311982 - DNA, 25 bp, Probe Sequence
ttttggcgtctactgattcctccaa

SEQ ID NO: 311983 - DNA, 25 bp, Probe Sequence
ttatacccttagctttcccataaga

SEQ ID NO: 311984 - DNA, 25 bp, Probe Sequence
ttttccacttaggatttcctaatct

SEQ ID NO: 311985 - DNA, 25 bp, Probe Sequence
ttttctcagtaagttcttctctgac

SEQ ID NO: 311986 - DNA, 25 bp, Probe Sequence
ttttggagtgaagattattgctaca

SEQ ID NO: 311987 - DNA, 25 bp, Probe Sequence
ttttcctgaaaccatacatttcaag

SEQ ID NO: 311988 - DNA, 25 bp, Probe Sequence
ttttcacttctcatgatagctgtta

SEQ ID NO: 311989 - DNA, 25 bp, Probe Sequence
ttattcagcttcggtgtcactgatc

SEQ ID NO: 311990 - DNA, 25 bp, Probe Sequence
ttatatacaatccagattcactgag

SEQ ID NO: 311991 - DNA, 25 bp, Probe Sequence
ttagttcatgacccatcatcagctg

SEQ ID NO: 311992 - DNA, 25 bp, Probe Sequence
ttttgtatcaatctctgactgcaac

SEQ ID NO: 311993 - DNA, 25 bp, Probe Sequence
ttttgctctaatcctccattaagcg

SEQ ID NO: 311994 - DNA, 25 bp, Probe Sequence
ttttctgctattatcactgataaag

SEQ ID NO: 311995 - DNA, 25 bp, Probe Sequence
ttttctgtcttcatatcagatacta

SEQ ID NO: 311996 - DNA, 25 bp, Probe Sequence
ttttcatgttaggcccaaatatact

SEQ ID NO: 311997 - DNA, 25 bp, Probe Sequence
ttttcttaagctcccaatttggctt

SEQ ID NO: 311998 - DNA, 25 bp, Probe Sequence
ttttctataggagctctttgtggtt

SEQ ID NO: 311999 - DNA, 25 bp, Probe Sequence
ttattctgtagacactttcaatggg

SEQ ID NO: 312000 - DNA, 25 bp, Probe Sequence
ttatcattaaagtcacttggaattg

SEQ ID NO: 312001 - DNA, 25 bp, Probe Sequence
ttatttaaacaggtagcacaatcta

SEQ ID NO: 312002 - DNA, 25 bp, Probe Sequence
ttatagtacccacacatgcaaaata

SEQ ID NO: 312003 - DNA, 25 bp, Probe Sequence
ttatgtgccccggaaagcaaaaaga

SEQ ID NO: 312004 - DNA, 25 bp, Probe Sequence
ttttgccccctcaaaggaaatatgc

SEQ ID NO: 312005 - DNA, 25 bp, Probe Sequence
ttttccttctccaaagaactcatac

SEQ ID NO: 312006 - DNA, 25 bp, Probe Sequence
ttttcattattttaggacgccaaca

SEQ ID NO: 312007 - DNA, 25 bp, Probe Sequence
ttttcagtattatatgtaccctctg

SEQ ID NO: 312008 - DNA, 25 bp, Probe Sequence
ttcttcagcgttttattgaccctct

SEQ ID NO: 312009 - DNA, 25 bp, Probe Sequence
ttttcaaggtttacgcactgcctct

SEQ ID NO: 312010 - DNA, 25 bp, Probe Sequence
ttttcacagctgactgaaccactcc

SEQ ID NO: 312011 - DNA, 25 bp, Probe Sequence
ttttcatactattagaccatatctc

SEQ ID NO: 312012 - DNA, 25 bp, Probe Sequence
ttatatataaattagcacctgagct

SEQ ID NO: 312013 - DNA, 25 bp, Probe Sequence
ttatatgtgtaattaacttagctac

SEQ ID NO: 312014 - DNA, 25 bp, Probe Sequence
ttatattcagaacaacctactatgt

SEQ ID NO: 312015 - DNA, 25 bp, Probe Sequence
ttatttaggtccagcagctacattt

SEQ ID NO: 312016 - DNA, 25 bp, Probe Sequence
ttatttggagtggaggcattgtttt

SEQ ID NO: 312017 - DNA, 25 bp, Probe Sequence
ttatttaaggaatatctcttgatat

SEQ ID NO: 312018 - DNA, 25 bp, Probe Sequence
ttattcaacatgcagatacttttta

SEQ ID NO: 312019 - DNA, 25 bp, Probe Sequence
ttattcacaatccctgatgttgggt

SEQ ID NO: 312020 - DNA, 25 bp, Probe Sequence
ttatgtgagagacccggcctaggct

SEQ ID NO: 312021 - DNA, 25 bp, Probe Sequence
ttttgagcatgaagaccgccacggt

SEQ ID NO: 312022 - DNA, 25 bp, Probe Sequence
ttagtagcatgttgagccaggcctg

SEQ ID NO: 312023 - DNA, 25 bp, Probe Sequence
ttatcatctagcagcagccgaacaa

SEQ ID NO: 312024 - DNA, 25 bp, Probe Sequence
ttatctgtgacttcatgctctgata

SEQ ID NO: 312025 - DNA, 25 bp, Probe Sequence
ttatcttgatatccagtgctgctta

SEQ ID NO: 312026 - DNA, 25 bp, Probe Sequence
ttattttgagccacgctgtgaccct

SEQ ID NO: 312027 - DNA, 25 bp, Probe Sequence
ttattttgagccacgctgtgaccct

SEQ ID NO: 312028 - DNA, 25 bp, Probe Sequence
ttattcataacccagctgtggacca

SEQ ID NO: 312029 - DNA, 25 bp, Probe Sequence
ttatgtgacaaccatgcaggctcct

SEQ ID NO: 312030 - DNA, 25 bp, Probe Sequence
ttatggaatatcatctgtcattata

SEQ ID NO: 312031 - DNA, 25 bp, Probe Sequence
ttattgagcttcatcatgaccagaa

SEQ ID NO: 312032 - DNA, 25 bp, Probe Sequence
ttttgatctgcttgtagcaccagct

SEQ ID NO: 312033 - DNA, 25 bp, Probe Sequence
ttatagacagtcgttcccagtgtgg

SEQ ID NO: 312034 - DNA, 25 bp, Probe Sequence
ttatccacggcactccgcgagctgt

SEQ ID NO: 312035 - DNA, 25 bp, Probe Sequence
ttatcccagcccaggagttctgttt

SEQ ID NO: 312036 - DNA, 25 bp, Probe Sequence
ttataaccccagctgtggtctctga

SEQ ID NO: 312037 - DNA, 25 bp, Probe Sequence
ttagaaatcggaggtgtggatgctc

SEQ ID NO: 312038 - DNA, 25 bp, Probe Sequence
ttagaaagcttaaggcggcctacag

SEQ ID NO: 312039 - DNA, 25 bp, Probe Sequence
ttatgccaccataatttgaggccta

SEQ ID NO: 312040 - DNA, 25 bp, Probe Sequence
ttaggcgccttgtttgagctgcgtt

SEQ ID NO: 312041 - DNA, 25 bp, Probe Sequence
ttaggacaacttatgactcagctct

SEQ ID NO: 312042 - DNA, 25 bp, Probe Sequence
ttagaagaagtgtgtgacctgctgc

SEQ ID NO: 312043 - DNA, 25 bp, Probe Sequence
ttagaaaaggactccctggccaggc

SEQ ID NO: 312044 - DNA, 25 bp, Probe Sequence
ttaaaaaactcctgtcttgctagac

SEQ ID NO: 312045 - DNA, 25 bp, Probe Sequence
ttaaaaaactcctgtcttgctagac

SEQ ID NO: 312046 - DNA, 25 bp, Probe Sequence
ttataattgaacctcctggctatgc

SEQ ID NO: 312047 - DNA, 25 bp, Probe Sequence
ttataatgtaatcgctcaagcctga

SEQ ID NO: 312048 - DNA, 25 bp, Probe Sequence
ttatagatgtgctctgctcattcgg

SEQ ID NO: 312049 - DNA, 25 bp, Probe Sequence
ttttctatgcattctctcatttgat

SEQ ID NO: 312050 - DNA, 25 bp, Probe Sequence
ttttcatggctgttgtcatggctga

SEQ ID NO: 312051 - DNA, 25 bp, Probe Sequence
ttatcacggcgacttcggctaacac

SEQ ID NO: 312052 - DNA, 25 bp, Probe Sequence
ttatagtggcagcatgccggtgtaa

SEQ ID NO: 312053 - DNA, 25 bp, Probe Sequence
ttatctgtgaaccatacgtgattaa

SEQ ID NO: 312054 - DNA, 25 bp, Probe Sequence
ttgacctgacagccatacgtattcc

SEQ ID NO: 312055 - DNA, 25 bp, Probe Sequence
ttatcctacagtttcttctttcctg

SEQ ID NO: 312056 - DNA, 25 bp, Probe Sequence
ttttctactgctcttattttgcctg

SEQ ID NO: 312057 - DNA, 25 bp, Probe Sequence
ttattctactctattttttagttca

SEQ ID NO: 312058 - DNA, 25 bp, Probe Sequence
ttactccattttgtttttttctctg

SEQ ID NO: 312059 - DNA, 25 bp, Probe Sequence
ttatgggtttggcttgtttttcttg

SEQ ID NO: 312060 - DNA, 25 bp, Probe Sequence
ttatgggtttggcttgtttttcttg

SEQ ID NO: 312061 - DNA, 25 bp, Probe Sequence
ttttggatcttgctgtggttttgtt

SEQ ID NO: 312062 - DNA, 25 bp, Probe Sequence
ttttggctttggttgtgatttcaga

SEQ ID NO: 312063 - DNA, 25 bp, Probe Sequence
ttttggccttgttcatgattttatg

SEQ ID NO: 312064 - DNA, 25 bp, Probe Sequence
ttttgccctagttaatcctgttgtt

SEQ ID NO: 312065 - DNA, 25 bp, Probe Sequence
ttttcctctatttcaaagtcatttt

SEQ ID NO: 312066 - DNA, 25 bp, Probe Sequence
ttttcttgtttatcagcagttgtta

SEQ ID NO: 312067 - DNA, 25 bp, Probe Sequence
ttttctcttttattccgattggtag

SEQ ID NO: 312068 - DNA, 25 bp, Probe Sequence
ttttccttttaatatctgtggtaga

SEQ ID NO: 312069 - DNA, 25 bp, Probe Sequence
ttttcgaatttatagtatgtggtga

SEQ ID NO: 312070 - DNA, 25 bp, Probe Sequence
ttttgccaatattgccaagttttta

SEQ ID NO: 312071 - DNA, 25 bp, Probe Sequence
ttttcccatttcgagacatctttta

SEQ ID NO: 312072 - DNA, 25 bp, Probe Sequence
ttttcctctcttcatactgtttgaa

SEQ ID NO: 312073 - DNA, 25 bp, Probe Sequence
ttttcctgtgctgttagctctttat

SEQ ID NO: 312074 - DNA, 25 bp, Probe Sequence
ttttgcttggttttgagtgtttact

SEQ ID NO: 312075 - DNA, 25 bp, Probe Sequence
ttattgttggtaatagtgctttata

SEQ ID NO: 312076 - DNA, 25 bp, Probe Sequence
ttattgatatttgtgcttctgccta

SEQ ID NO: 312077 - DNA, 25 bp, Probe Sequence
ttttgagatcttactgcttgtcact

SEQ ID NO: 312078 - DNA, 25 bp, Probe Sequence
ttatatatgcactttgctgtttgat

SEQ ID NO: 312079 - DNA, 25 bp, Probe Sequence
ttattctgcctagtgctattctgct

SEQ ID NO: 312080 - DNA, 25 bp, Probe Sequence
ttattctgcctagtgctattctgct

SEQ ID NO: 312081 - DNA, 25 bp, Probe Sequence
ttttctgcatctactgatattatca

SEQ ID NO: 312082 - DNA, 25 bp, Probe Sequence
ttttctgcattgactgcattttttt

SEQ ID NO: 312083 - DNA, 25 bp, Probe Sequence
ttttgctcagttagattccatcatt

SEQ ID NO: 312084 - DNA, 25 bp, Probe Sequence
ttcagtccgtttatcactttaccaa

SEQ ID NO: 312085 - DNA, 25 bp, Probe Sequence
ttaatcctggttaccgtgtgtacca

SEQ ID NO: 312086 - DNA, 25 bp, Probe Sequence
ttataccttcatttcagcgtggtaa

SEQ ID NO: 312087 - DNA, 25 bp, Probe Sequence
ttatcctgcccatccatttgaggaa

SEQ ID NO: 312088 - DNA, 25 bp, Probe Sequence
ttatcctgtatcagccttgtgagta

SEQ ID NO: 312089 - DNA, 25 bp, Probe Sequence
ttatactgtccagctctgttgattt

SEQ ID NO: 312090 - DNA, 25 bp, Probe Sequence
ttatcagttccagagtgctacttat

SEQ ID NO: 312091 - DNA, 25 bp, Probe Sequence
ttattgctacaagatgtatcaattt

SEQ ID NO: 312092 - DNA, 25 bp, Probe Sequence
ttttgtgacaaggtttcgttttcat

SEQ ID NO: 312093 - DNA, 25 bp, Probe Sequence
ttttgctgaaatcctgttttgtatt

SEQ ID NO: 312094 - DNA, 25 bp, Probe Sequence
ttttgctgtacgcgttttttgagat

SEQ ID NO: 312095 - DNA, 25 bp, Probe Sequence
ttttgctttctgcttttatttataa

SEQ ID NO: 312096 - DNA, 25 bp, Probe Sequence
ttttctttcagcctattttgagtta

SEQ ID NO: 312097 - DNA, 25 bp, Probe Sequence
ttagcctttacctgtgaagtgttac

SEQ ID NO: 312098 - DNA, 25 bp, Probe Sequence
ttagaattcccctctggagggctat

SEQ ID NO: 312099 - DNA, 25 bp, Probe Sequence
ttagccatttacctacggagggttg

SEQ ID NO: 312100 - DNA, 25 bp, Probe Sequence
ttagcctcttaggagttggagcagg

SEQ ID NO: 312101 - DNA, 25 bp, Probe Sequence
ttcgactcctctgagaaggacgggc

SEQ ID NO: 312102 - DNA, 25 bp, Probe Sequence
ttggaccggcgcaagacggaccaga

SEQ ID NO: 312103 - DNA, 25 bp, Probe Sequence
ttggcctgggcctggtagagccagg

SEQ ID NO: 312104 - DNA, 25 bp, Probe Sequence
ttatgactttggtgagtagccttga

SEQ ID NO: 312105 - DNA, 25 bp, Probe Sequence
ttatgggagggagtagaactttgac

SEQ ID NO: 312106 - DNA, 25 bp, Probe Sequence
ttagggctcgtggggaagcggctga

SEQ ID NO: 312107 - DNA, 25 bp, Probe Sequence
ttagggctcgtggggaagcggctga

SEQ ID NO: 312108 - DNA, 25 bp, Probe Sequence
ttagcgatcccggtcggaaatgctg

SEQ ID NO: 312109 - DNA, 25 bp, Probe Sequence
ttagccttcgcggggcaaaatggag

SEQ ID NO: 312110 - DNA, 25 bp, Probe Sequence
ttgaggccagcctcggtaacaggat

SEQ ID NO: 312111 - DNA, 25 bp, Probe Sequence
ttaggccatgcctttttaccaaatt

SEQ ID NO: 312112 - DNA, 25 bp, Probe Sequence
ttatatcctcatgtttatcccaaac

SEQ ID NO: 312113 - DNA, 25 bp, Probe Sequence
ttttcctattttatgcccattatcc

SEQ ID NO: 312114 - DNA, 25 bp, Probe Sequence
ttttccttattgtattctgtaatat

SEQ ID NO: 312115 - DNA, 25 bp, Probe Sequence
ttttccttttgcgattttcactgat

SEQ ID NO: 312116 - DNA, 25 bp, Probe Sequence
ttttcctatctctatgattttacta

SEQ ID NO: 312117 - DNA, 25 bp, Probe Sequence
ttttgactctgttgagtacatatac

SEQ ID NO: 312118 - DNA, 25 bp, Probe Sequence
ttttgcctctgtgagttcatctgat

SEQ ID NO: 312119 - DNA, 25 bp, Probe Sequence
ttttgtgcctgtgcagattgcaata

SEQ ID NO: 312120 - DNA, 25 bp, Probe Sequence
ttttgctctctgagccttgcaaaac

SEQ ID NO: 312121 - DNA, 25 bp, Probe Sequence
ttttgttctgagctccataagaact

SEQ ID NO: 312122 - DNA, 25 bp, Probe Sequence
ttatttctctcctcgataaaacgga

SEQ ID NO: 312123 - DNA, 25 bp, Probe Sequence
ttagttctgctctctctgtaggaac

SEQ ID NO: 312124 - DNA, 25 bp, Probe Sequence
ttaaatcctccagcttttgaacctt

SEQ ID NO: 312125 - DNA, 25 bp, Probe Sequence
ttataaccaccagccgttaaaaatg

SEQ ID NO: 312126 - DNA, 25 bp, Probe Sequence
ttccagaccacctcggtaaagccaa

SEQ ID NO: 312127 - DNA, 25 bp, Probe Sequence
ttaaaagcagtctcggaaacacaga

SEQ ID NO: 312128 - DNA, 25 bp, Probe Sequence
ttaaaaaggatcccgtagcaggcag

SEQ ID NO: 312129 - DNA, 25 bp, Probe Sequence
ttaggattaggtggtcctcacaggg

SEQ ID NO: 312130 - DNA, 25 bp, Probe Sequence
ttaggaccaggtccccttgagaggt

SEQ ID NO: 312131 - DNA, 25 bp, Probe Sequence
ttaacaccgtcaccaccttggtgga

SEQ ID NO: 312132 - DNA, 25 bp, Probe Sequence
ttaacaccgtcaccaccttggtgga

SEQ ID NO: 312133 - DNA, 25 bp, Probe Sequence
ttaaagacgataaccctcacctgaa

SEQ ID NO: 312134 - DNA, 25 bp, Probe Sequence
ttataaccgctgagcagccacactc

SEQ ID NO: 312135 - DNA, 25 bp, Probe Sequence
ttattcacaccgatagcaacaccgt

SEQ ID NO: 312136 - DNA, 25 bp, Probe Sequence
ttattcacacccagtgtcacctagg

SEQ ID NO: 312137 - DNA, 25 bp, Probe Sequence
ttatccagaccaaagagctgcctct

SEQ ID NO: 312138 - DNA, 25 bp, Probe Sequence
ttatccgatccataaagccctacag

SEQ ID NO: 312139 - DNA, 25 bp, Probe Sequence
ttattcttccagcagaattactact

SEQ ID NO: 312140 - DNA, 25 bp, Probe Sequence
ttattcttacactaaatggatcaac

SEQ ID NO: 312141 - DNA, 25 bp, Probe Sequence
ttatttgtatgttctaatggctaaa

SEQ ID NO: 312142 - DNA, 25 bp, Probe Sequence
ttattattggagcctaattgttagg

SEQ ID NO: 312143 - DNA, 25 bp, Probe Sequence
ttttcttgagagcctgtagatttct

SEQ ID NO: 312144 - DNA, 25 bp, Probe Sequence
ttttcttctatgccttaggcttcga

SEQ ID NO: 312145 - DNA, 25 bp, Probe Sequence
ttttccatcttgttctggcctagag

SEQ ID NO: 312146 - DNA, 25 bp, Probe Sequence
ttattgcctctgatacatacctaag

SEQ ID NO: 312147 - DNA, 25 bp, Probe Sequence
ttaggactctgcattaactctataa

SEQ ID NO: 312148 - DNA, 25 bp, Probe Sequence
ttagaactttctgactcctctagag

SEQ ID NO: 312149 - DNA, 25 bp, Probe Sequence
ttattcctatttcacgttcacatgg

SEQ ID NO: 312150 - DNA, 25 bp, Probe Sequence
ttattcctgttttctcagcttaata

SEQ ID NO: 312151 - DNA, 25 bp, Probe Sequence
ttttccagtaattctaggtcagcaa

SEQ ID NO: 312152 - DNA, 25 bp, Probe Sequence
ttttcctgctagtgtagcttctgaa

SEQ ID NO: 312153 - DNA, 25 bp, Probe Sequence
ttttccactgaattgaactcatcta

SEQ ID NO: 312154 - DNA, 25 bp, Probe Sequence
ttttccacagaatgatcaagttgac

SEQ ID NO: 312155 - DNA, 25 bp, Probe Sequence
ttttctccagaatttgaagatctag

SEQ ID NO: 312156 - DNA, 25 bp, Probe Sequence
ttttctccaggacgtaattcatagg

SEQ ID NO: 312157 - DNA, 25 bp, Probe Sequence
ttttccaggggaattgttgcaatgg

SEQ ID NO: 312158 - DNA, 25 bp, Probe Sequence
ttttccagggaaattttgacaatga

SEQ ID NO: 312159 - DNA, 25 bp, Probe Sequence
ttgtcctccggtatgttctaaagct

SEQ ID NO: 312160 - DNA, 25 bp, Probe Sequence
ttgtcctccggtatgttctaaagct

SEQ ID NO: 312161 - DNA, 25 bp, Probe Sequence
ttttctcctcttaagttcattaaga

SEQ ID NO: 312162 - DNA, 25 bp, Probe Sequence
ttttccctgtgtattctagtgaatg

SEQ ID NO: 312163 - DNA, 25 bp, Probe Sequence
ttattggttgtgtaatcctttgtga

SEQ ID NO: 312164 - DNA, 25 bp, Probe Sequence
ttattgttcttatttccctttacag

SEQ ID NO: 312165 - DNA, 25 bp, Probe Sequence
ttatttctctctcttaagcttaaaa

SEQ ID NO: 312166 - DNA, 25 bp, Probe Sequence
ttatttttagactcacagctctcac

SEQ ID NO: 312167 - DNA, 25 bp, Probe Sequence
ttattcttttatggaacacttcagc

SEQ ID NO: 312168 - DNA, 25 bp, Probe Sequence
ttttctgttgtatttcatttccagt

SEQ ID NO: 312169 - DNA, 25 bp, Probe Sequence
ttttctgttgtcttctcaaattctg

SEQ ID NO: 312170 - DNA, 25 bp, Probe Sequence
ttttctgtctcgttgatctaatatt

SEQ ID NO: 312171 - DNA, 25 bp, Probe Sequence
ttttgcaatctacttatctaacaaa

SEQ ID NO: 312172 - DNA, 25 bp, Probe Sequence
ttattgcaatgatgcctaccaaaca

SEQ ID NO: 312173 - DNA, 25 bp, Probe Sequence
ttattgcaaacctatacacaaccaa

SEQ ID NO: 312174 - DNA, 25 bp, Probe Sequence
ttatctgataaagttacaagtcaca

SEQ ID NO: 312175 - DNA, 25 bp, Probe Sequence
ttatctgtatatctgaactcttgaa

SEQ ID NO: 312176 - DNA, 25 bp, Probe Sequence
ttatgctgtaagggctcgtctcgtc

SEQ ID NO: 312177 - DNA, 25 bp, Probe Sequence
ttatgtgtacgacctcattgccgtg

SEQ ID NO: 312178 - DNA, 25 bp, Probe Sequence
ttatggattcaatgccatccccatc

SEQ ID NO: 312179 - DNA, 25 bp, Probe Sequence
ttatgcacttaattcactgccaatt

SEQ ID NO: 312180 - DNA, 25 bp, Probe Sequence
ttattgcttaatttctgcctttccc

SEQ ID NO: 312181 - DNA, 25 bp, Probe Sequence
ttattattgcaaacattccactacc

SEQ ID NO: 312182 - DNA, 25 bp, Probe Sequence
ttattgttgacaagaatcaatgcgt

SEQ ID NO: 312183 - DNA, 25 bp, Probe Sequence
ttattgttgacatgaatctatgcgt

SEQ ID NO: 312184 - DNA, 25 bp, Probe Sequence
ttttgtcataaatatcttcctacca

SEQ ID NO: 312185 - DNA, 25 bp, Probe Sequence
ttttgccatattaaatcttcctcat

SEQ ID NO: 312186 - DNA, 25 bp, Probe Sequence
ttttgcctattgtgattatcgctat

SEQ ID NO: 312187 - DNA, 25 bp, Probe Sequence
ttttccttttccatgagctgtgtta

SEQ ID NO: 312188 - DNA, 25 bp, Probe Sequence
ttttcctttctaaagagctcttcta

SEQ ID NO: 312189 - DNA, 25 bp, Probe Sequence
ttatttttattaccaagcgcttctt

SEQ ID NO: 312190 - DNA, 25 bp, Probe Sequence
ttatgcctctgtaaaccaaatttct

SEQ ID NO: 312191 - DNA, 25 bp, Probe Sequence
ttttctctatataactcattctatt

SEQ ID NO: 312192 - DNA, 25 bp, Probe Sequence
ttattgtctacaaaccattaaatgt

SEQ ID NO: 312193 - DNA, 25 bp, Probe Sequence
ttcattggtcaaactcaattttaga

SEQ ID NO: 312194 - DNA, 25 bp, Probe Sequence
ttcaatgggcaaaactttactagta

SEQ ID NO: 312195 - DNA, 25 bp, Probe Sequence
ttcacagggtaattggtaggctaaa

SEQ ID NO: 312196 - DNA, 25 bp, Probe Sequence
ttcacaggggaccaggttcttcgag

SEQ ID NO: 312197 - DNA, 25 bp, Probe Sequence
ttacaaggcaggcctttcctacagg

SEQ ID NO: 312198 - DNA, 25 bp, Probe Sequence
ttccaaatgagcccaaattccactg

SEQ ID NO: 312199 - DNA, 25 bp, Probe Sequence
ttaaagtgaccctaatctggctgca

SEQ ID NO: 312200 - DNA, 25 bp, Probe Sequence
ttacacgtacctctcatcagtgtcc

SEQ ID NO: 312201 - DNA, 25 bp, Probe Sequence
ttacgtccaccaaactagatgttgc

SEQ ID NO: 312202 - DNA, 25 bp, Probe Sequence
ttatcctccaccacaaagggctgga

SEQ ID NO: 312203 - DNA, 25 bp, Probe Sequence
ttatcgccgacctcaggggtcatga

SEQ ID NO: 312204 - DNA, 25 bp, Probe Sequence
ttacctcaacgagcagggagatcga

SEQ ID NO: 312205 - DNA, 25 bp, Probe Sequence
ttttctgcaacttcacagcaggggg

SEQ ID NO: 312206 - DNA, 25 bp, Probe Sequence
ttttctggacaatgccagcatttgg

SEQ ID NO: 312207 - DNA, 25 bp, Probe Sequence
ttttgctggacactgtgtccttatg

SEQ ID NO: 312208 - DNA, 25 bp, Probe Sequence
ttttgctgctatggtggttgtatta

SEQ ID NO: 312209 - DNA, 25 bp, Probe Sequence
ttttgcctgttagtgattgtttcac

SEQ ID NO: 312210 - DNA, 25 bp, Probe Sequence
ttttctcagttgtctgtatgacttc

SEQ ID NO: 312211 - DNA, 25 bp, Probe Sequence
ttttctcgctgttgcagaaggtgtc

SEQ ID NO: 312212 - DNA, 25 bp, Probe Sequence
ttttgcatgcctgaagaagtgcttc

SEQ ID NO: 312213 - DNA, 25 bp, Probe Sequence
ttattgctgacttcaaagggctgtt

SEQ ID NO: 312214 - DNA, 25 bp, Probe Sequence
ttttgtaataaatggcctgatgcta

SEQ ID NO: 312215 - DNA, 25 bp, Probe Sequence
ttttggaaccagtaggccgctctac

SEQ ID NO: 312216 - DNA, 25 bp, Probe Sequence
ttctgggaatctacataccccctac

SEQ ID NO: 312217 - DNA, 25 bp, Probe Sequence
ttatggaagattatgctccccctaa

SEQ ID NO: 312218 - DNA, 25 bp, Probe Sequence
ttattgaaactcaccattgccctat

SEQ ID NO: 312219 - DNA, 25 bp, Probe Sequence
ttattaaactctttctctgctgcaa

SEQ ID NO: 312220 - DNA, 25 bp, Probe Sequence
ttattcaatccatattttctctgac

SEQ ID NO: 312221 - DNA, 25 bp, Probe Sequence
ttatttcatccagtttgttctccgg

SEQ ID NO: 312222 - DNA, 25 bp, Probe Sequence
ttttgtagccagtattcttctcctt

SEQ ID NO: 312223 - DNA, 25 bp, Probe Sequence
ttttgatcagcctcaattcagcctc

SEQ ID NO: 312224 - DNA, 25 bp, Probe Sequence
ttttgaagatcattttctcagcctc

SEQ ID NO: 312225 - DNA, 25 bp, Probe Sequence
ttttgaagtacatcttctggcccct

SEQ ID NO: 312226 - DNA, 25 bp, Probe Sequence
ttactaatgtacgctgctgcaggac

SEQ ID NO: 312227 - DNA, 25 bp, Probe Sequence
ttactaatgtacgctgctgcaggac

SEQ ID NO: 312228 - DNA, 25 bp, Probe Sequence
ttactgaattcaaccccatagcatc

SEQ ID NO: 312229 - DNA, 25 bp, Probe Sequence
ttgagtacagtgtcccctatagatc

SEQ ID NO: 312230 - DNA, 25 bp, Probe Sequence
ttatctcaagtctcaattgaactgc

SEQ ID NO: 312231 - DNA, 25 bp, Probe Sequence
ttatcttttcacagcaagaacagtc

SEQ ID NO: 312232 - DNA, 25 bp, Probe Sequence
ttattactctcacccataaacagta

SEQ ID NO: 312233 - DNA, 25 bp, Probe Sequence
ttattaccaagcccagagatacaga

SEQ ID NO: 312234 - DNA, 25 bp, Probe Sequence
ttagtgaccacctcaagtcaaagac

SEQ ID NO: 312235 - DNA, 25 bp, Probe Sequence
ttaagtcctccatatgaccattatg

SEQ ID NO: 312236 - DNA, 25 bp, Probe Sequence
ttaaacctaccattgacctgtgtgt

SEQ ID NO: 312237 - DNA, 25 bp, Probe Sequence
ttaaatggctactttggtttctgtc

SEQ ID NO: 312238 - DNA, 25 bp, Probe Sequence
ttagttggaccaatgatcgattttg

SEQ ID NO: 312239 - DNA, 25 bp, Probe Sequence
ttattgggtgccatttgatattcat

SEQ ID NO: 312240 - DNA, 25 bp, Probe Sequence
ttttctgggtctttgttttcttgat

SEQ ID NO: 312241 - DNA, 25 bp, Probe Sequence
ttttccgtcttatttcatttctgta

SEQ ID NO: 312242 - DNA, 25 bp, Probe Sequence
ttttggtctctttttcttatattca

SEQ ID NO: 312243 - DNA, 25 bp, Probe Sequence
ttttgtattcttacgtttactctgc

SEQ ID NO: 312244 - DNA, 25 bp, Probe Sequence
ttttgttttgttccattgtagctct

SEQ ID NO: 312245 - DNA, 25 bp, Probe Sequence
ttattggtattgtttttgtagtaat

SEQ ID NO: 312246 - DNA, 25 bp, Probe Sequence
ttttgagatacgtttattgtattca

SEQ ID NO: 312247 - DNA, 25 bp, Probe Sequence
ttattagttcgttttgctgaaatat

SEQ ID NO: 312248 - DNA, 25 bp, Probe Sequence
ttttccttcatttttgtgagaatag

SEQ ID NO: 312249 - DNA, 25 bp, Probe Sequence
ttattgcacttctttttgagaaata

SEQ ID NO: 312250 - DNA, 25 bp, Probe Sequence
ttatagacttttcttcaaacatatt

SEQ ID NO: 312251 - DNA, 25 bp, Probe Sequence
ttatgcgggtttcctaaaaattctg

SEQ ID NO: 312252 - DNA, 25 bp, Probe Sequence
ttagggggcttttcacattaactgc

SEQ ID NO: 312253 - DNA, 25 bp, Probe Sequence
ttagtggggttggccccatgaagtg

SEQ ID NO: 312254 - DNA, 25 bp, Probe Sequence
ttattttcagttgccctaacatgtt

SEQ ID NO: 312255 - DNA, 25 bp, Probe Sequence
ttttcctcctacacgtggacattat

SEQ ID NO: 312256 - DNA, 25 bp, Probe Sequence
ttttccagccttatgtgttacatta

SEQ ID NO: 312257 - DNA, 25 bp, Probe Sequence
ttttccaacataatggattaatgtt

SEQ ID NO: 312258 - DNA, 25 bp, Probe Sequence
ttatttaaccaaatcttaatgttga

SEQ ID NO: 312259 - DNA, 25 bp, Probe Sequence
ttctgttaacctattatcactaaga

SEQ ID NO: 312260 - DNA, 25 bp, Probe Sequence
ttttgtcaacttcctgattatgtaa

SEQ ID NO: 312261 - DNA, 25 bp, Probe Sequence
ttttgtcgatgccaccgcatttata

SEQ ID NO: 312262 - DNA, 25 bp, Probe Sequence
ttattgttatacacagctttatgat

SEQ ID NO: 312263 - DNA, 25 bp, Probe Sequence
ttttgactagacatcctgtgcaata

SEQ ID NO: 312264 - DNA, 25 bp, Probe Sequence
ttatcatcctagaaagccttgacta

SEQ ID NO: 312265 - DNA, 25 bp, Probe Sequence
ttagcttctcaaaggcctaaccaag

SEQ ID NO: 312266 - DNA, 25 bp, Probe Sequence
ttggcttgtcgaatgagcgtaggta

SEQ ID NO: 312267 - DNA, 25 bp, Probe Sequence
ttagttgctagactccctggagtat

SEQ ID NO: 312268 - DNA, 25 bp, Probe Sequence
ttatgtgcaggtcctagcctggggt

SEQ ID NO: 312269 - DNA, 25 bp, Probe Sequence
ttatggaggtcctccatgcagagag

SEQ ID NO: 312270 - DNA, 25 bp, Probe Sequence
ttatgtggttcctcagtgcaatgac

SEQ ID NO: 312271 - DNA, 25 bp, Probe Sequence
ttattcttacctatgtcaatgaaat

SEQ ID NO: 312272 - DNA, 25 bp, Probe Sequence
ttttcccctcttaggaagacatact

SEQ ID NO: 312273 - DNA, 25 bp, Probe Sequence
ttttcccttgaaaggacataataat

SEQ ID NO: 312274 - DNA, 25 bp, Probe Sequence
ttattccttgtgaggcgacataaca

SEQ ID NO: 312275 - DNA, 25 bp, Probe Sequence
ttttccttgctcctgccaggattaa

SEQ ID NO: 312276 - DNA, 25 bp, Probe Sequence
ttataaagtctcctccgtgataacg

SEQ ID NO: 312277 - DNA, 25 bp, Probe Sequence
ttagggagtcccctcttaggacagg

SEQ ID NO: 312278 - DNA, 25 bp, Probe Sequence
ttaggggcttaaacattacgactga

SEQ ID NO: 312279 - DNA, 25 bp, Probe Sequence
ttatggtagcttttactttttatga

SEQ ID NO: 312280 - DNA, 25 bp, Probe Sequence
ttttgatttatatactctgttttac

SEQ ID NO: 312281 - DNA, 25 bp, Probe Sequence
ttttctgtgttatattctgcttggt

SEQ ID NO: 312282 - DNA, 25 bp, Probe Sequence
ttattcttcgtctttttgcttggat

SEQ ID NO: 312283 - DNA, 25 bp, Probe Sequence
ttagtgaaggtggcttttgctttat

SEQ ID NO: 312284 - DNA, 25 bp, Probe Sequence
ttagttgaagagcacatttctttca

SEQ ID NO: 312285 - DNA, 25 bp, Probe Sequence
ttaggctttagcagctttgcatttc

SEQ ID NO: 312286 - DNA, 25 bp, Probe Sequence
ttatggtttgagtcctgttgctgcc

SEQ ID NO: 312287 - DNA, 25 bp, Probe Sequence
ttatgtttaaatggcttggtgtctt

SEQ ID NO: 312288 - DNA, 25 bp, Probe Sequence
ttatttttcaacctgtggcagagct

SEQ ID NO: 312289 - DNA, 25 bp, Probe Sequence
ttttgttttcagcctatggaatgat

SEQ ID NO: 312290 - DNA, 25 bp, Probe Sequence
ttattgttgttacatatgagctatg

SEQ ID NO: 312291 - DNA, 25 bp, Probe Sequence
ttatttcagttgctatatcataagc

SEQ ID NO: 312292 - DNA, 25 bp, Probe Sequence
ttagtaagtggcaattccatacata

SEQ ID NO: 312293 - DNA, 25 bp, Probe Sequence
ttagatacaagccttaccaacaatt

SEQ ID NO: 312294 - DNA, 25 bp, Probe Sequence
ttagcagaacgctcttgaaacaagt

SEQ ID NO: 312295 - DNA, 25 bp, Probe Sequence
ttagcagtgactgtttgacataaaa

SEQ ID NO: 312296 - DNA, 25 bp, Probe Sequence
ttatgtcatactaacttgtgaaaaa

SEQ ID NO: 312297 - DNA, 25 bp, Probe Sequence
ttagttggcttaccatgggaaaaca

SEQ ID NO: 312298 - DNA, 25 bp, Probe Sequence
ttcagttacttacccaggatcacaa

SEQ ID NO: 312299 - DNA, 25 bp, Probe Sequence
ttctgttggcgttgttcaggaccac

SEQ ID NO: 312300 - DNA, 25 bp, Probe Sequence
ttgtgaattcatctgttaacccctc

SEQ ID NO: 312301 - DNA, 25 bp, Probe Sequence
ttagcgttcatccgtgtaacccgct

SEQ ID NO: 312302 - DNA, 25 bp, Probe Sequence
ttactgcttgtcacttgaatcccgt

SEQ ID NO: 312303 - DNA, 25 bp, Probe Sequence
ttatactagtatccttaatcatttt

SEQ ID NO: 312304 - DNA, 25 bp, Probe Sequence
ttatacgtgggagctaatcattgca

SEQ ID NO: 312305 - DNA, 25 bp, Probe Sequence
ttaccgtgggcaactctgtcaacga

SEQ ID NO: 312306 - DNA, 25 bp, Probe Sequence
ttatgtcagtagtcaccttgctcac

SEQ ID NO: 312307 - DNA, 25 bp, Probe Sequence
ttatgccactctggatcaaatctac

SEQ ID NO: 312308 - DNA, 25 bp, Probe Sequence
ttatgccactcgatgcaacaaacat

SEQ ID NO: 312309 - DNA, 25 bp, Probe Sequence
ttatctcattgcctgctacatacaa

SEQ ID NO: 312310 - DNA, 25 bp, Probe Sequence
ttattatgtctgtcttatcatgcaa

SEQ ID NO: 312311 - DNA, 25 bp, Probe Sequence
ttttgcagttaccatctcatcacat

SEQ ID NO: 312312 - DNA, 25 bp, Probe Sequence
ttttgatgttgcatgctctcagaat

SEQ ID NO: 312313 - DNA, 25 bp, Probe Sequence
ttttgtgttcaatccagatggaagc

SEQ ID NO: 312314 - DNA, 25 bp, Probe Sequence
ttctaggactaattctccaagaagc

SEQ ID NO: 312315 - DNA, 25 bp, Probe Sequence
ttctcagaagctgatttaaaagagc

SEQ ID NO: 312316 - DNA, 25 bp, Probe Sequence
ttttccactcagattaatatgaagc

SEQ ID NO: 312317 - DNA, 25 bp, Probe Sequence
ttattccacctgctgctatgaagcc

SEQ ID NO: 312318 - DNA, 25 bp, Probe Sequence
ttattcccgctgactgagtctctga

SEQ ID NO: 312319 - DNA, 25 bp, Probe Sequence
ttattcacggtaatgatgttctata

SEQ ID NO: 312320 - DNA, 25 bp, Probe Sequence
ttagtctcgaggatgtgggcttatt

SEQ ID NO: 312321 - DNA, 25 bp, Probe Sequence
ttgaccttggacctgcttggttaag

SEQ ID NO: 312322 - DNA, 25 bp, Probe Sequence
ttgaacagggccctgaagcgcgtac

SEQ ID NO: 312323 - DNA, 25 bp, Probe Sequence
ttatacagtaccctaacctgctact

SEQ ID NO: 312324 - DNA, 25 bp, Probe Sequence
ttatcacaggactttaacaccatat

SEQ ID NO: 312325 - DNA, 25 bp, Probe Sequence
ttatccagcctctgctaggcttcaa

SEQ ID NO: 312326 - DNA, 25 bp, Probe Sequence
ttacgagtctcttgccaaggtcaag

SEQ ID NO: 312327 - DNA, 25 bp, Probe Sequence
ttacgaaccttcgaatggttggaat

SEQ ID NO: 312328 - DNA, 25 bp, Probe Sequence
ttacgtccgtatccattacttcgac

SEQ ID NO: 312329 - DNA, 25 bp, Probe Sequence
ttaacccgtgagctctaattggatt

SEQ ID NO: 312330 - DNA, 25 bp, Probe Sequence
ttatacccaggtccccaattgagaa

SEQ ID NO: 312331 - DNA, 25 bp, Probe Sequence
ttatccccaggaactccgacgaaat

SEQ ID NO: 312332 - DNA, 25 bp, Probe Sequence
ttatccccaggaaatcttcagcaac

SEQ ID NO: 312333 - DNA, 25 bp, Probe Sequence
ttatcccccgcaaagacatcaaacc

SEQ ID NO: 312334 - DNA, 25 bp, Probe Sequence
ttatcccccgcaaagacatcaaacc

SEQ ID NO: 312335 - DNA, 25 bp, Probe Sequence
ttatcatagccccattgaatgcaag

SEQ ID NO: 312336 - DNA, 25 bp, Probe Sequence
ttatcaacaacttgtgacatgagat

SEQ ID NO: 312337 - DNA, 25 bp, Probe Sequence
ttatcatcctcactgtggagtaatg

SEQ ID NO: 312338 - DNA, 25 bp, Probe Sequence
ttatatgcctcactggttgttattc

SEQ ID NO: 312339 - DNA, 25 bp, Probe Sequence
ttatatgttcacagttacttttttt

SEQ ID NO: 312340 - DNA, 25 bp, Probe Sequence
ttttgttcctgcgttactttgctga

SEQ ID NO: 312341 - DNA, 25 bp, Probe Sequence
ttttgctatctgtttgtactttgta

SEQ ID NO: 312342 - DNA, 25 bp, Probe Sequence
ttttgcctttctaagccttgtgcta

SEQ ID NO: 312343 - DNA, 25 bp, Probe Sequence
ttttccattttatgctctatgatct

SEQ ID NO: 312344 - DNA, 25 bp, Probe Sequence
ttttgcatttttaactccagatatc

SEQ ID NO: 312345 - DNA, 25 bp, Probe Sequence
ttttgcatttttaactccagatatc

SEQ ID NO: 312346 - DNA, 25 bp, Probe Sequence
ttttgtttctttgctgaccattcac

SEQ ID NO: 312347 - DNA, 25 bp, Probe Sequence
ttgttttgttttgctacgagtccac

SEQ ID NO: 312348 - DNA, 25 bp, Probe Sequence
ttgttttgttttgctacgagtccac

SEQ ID NO: 312349 - DNA, 25 bp, Probe Sequence
ttgaactttataatcctcgggtcca

SEQ ID NO: 312350 - DNA, 25 bp, Probe Sequence
ttataagttttgacccgcagagtgc

SEQ ID NO: 312351 - DNA, 25 bp, Probe Sequence
ttatacactgttctccaaaggtacc

SEQ ID NO: 312352 - DNA, 25 bp, Probe Sequence
ttattattgcttgtgcctcaactgt

SEQ ID NO: 312353 - DNA, 25 bp, Probe Sequence
ttattttctctgaatcctcttcact

SEQ ID NO: 312354 - DNA, 25 bp, Probe Sequence
ttattttgctttagcatccttactc

SEQ ID NO: 312355 - DNA, 25 bp, Probe Sequence
ttagtctggcttcatgttttacatc

SEQ ID NO: 312356 - DNA, 25 bp, Probe Sequence
ttagattgcacagttaattttcact

SEQ ID NO: 312357 - DNA, 25 bp, Probe Sequence
ttagaacacattgtattggtattac

SEQ ID NO: 312358 - DNA, 25 bp, Probe Sequence
ttataacatcttattgttggtaata

SEQ ID NO: 312359 - DNA, 25 bp, Probe Sequence
ttataacacttgtctttcagagata

SEQ ID NO: 312360 - DNA, 25 bp, Probe Sequence
ttatagaccagctactttataaaca

SEQ ID NO: 312361 - DNA, 25 bp, Probe Sequence
ttataggcttgttttcttaatatgc

SEQ ID NO: 312362 - DNA, 25 bp, Probe Sequence
ttatatcatcctcaaccctaaatgg

SEQ ID NO: 312363 - DNA, 25 bp, Probe Sequence
ttacatagctctctgacccattaat

SEQ ID NO: 312364 - DNA, 25 bp, Probe Sequence
ttacatatgacctatgcactcctcc

SEQ ID NO: 312365 - DNA, 25 bp, Probe Sequence
ttataaggccatcgcacttgccact

SEQ ID NO: 312366 - DNA, 25 bp, Probe Sequence
ttataaggccatcgcacttgccact

SEQ ID NO: 312367 - DNA, 25 bp, Probe Sequence
ttatcagcaggcatctgcacagatg

SEQ ID NO: 312368 - DNA, 25 bp, Probe Sequence
ttatatgcaatgccactgcatccat

SEQ ID NO: 312369 - DNA, 25 bp, Probe Sequence
ttatatctatcgtctgcatcactct

SEQ ID NO: 312370 - DNA, 25 bp, Probe Sequence
ttatcttatccaagcatcacgatta

SEQ ID NO: 312371 - DNA, 25 bp, Probe Sequence
ttatgctttaatgctgttatctatc

SEQ ID NO: 312372 - DNA, 25 bp, Probe Sequence
ttatcacttagttgttcatattatg

SEQ ID NO: 312373 - DNA, 25 bp, Probe Sequence
ttctactctattttttagttcaact

SEQ ID NO: 312374 - DNA, 25 bp, Probe Sequence
ttctacttatcctcattacccaggt

SEQ ID NO: 312375 - DNA, 25 bp, Probe Sequence
ttttgtctaatatcttagcccagtt

SEQ ID NO: 312376 - DNA, 25 bp, Probe Sequence
ttattttgctttgcttacccagtct

SEQ ID NO: 312377 - DNA, 25 bp, Probe Sequence
ttattttgctttgcttacccagtct

SEQ ID NO: 312378 - DNA, 25 bp, Probe Sequence
ttattacattttgactaccacaact

SEQ ID NO: 312379 - DNA, 25 bp, Probe Sequence
ttaccactttcaaaaatctacagac

SEQ ID NO: 312380 - DNA, 25 bp, Probe Sequence
ttaccctttcattcagcctttagaa

SEQ ID NO: 312381 - DNA, 25 bp, Probe Sequence
ttaccctttcattcagcctttagaa

SEQ ID NO: 312382 - DNA, 25 bp, Probe Sequence
ttacagcttttttcccaaaaatgat

SEQ ID NO: 312383 - DNA, 25 bp, Probe Sequence
ttcgctcgtttatccaataaacatt

SEQ ID NO: 312384 - DNA, 25 bp, Probe Sequence
ttaccaaatgtataaatacctcatt

SEQ ID NO: 312385 - DNA, 25 bp, Probe Sequence
ttatccacaaggtagaaatcaccca

SEQ ID NO: 312386 - DNA, 25 bp, Probe Sequence
ttacaactgcatcaagaccaccaaa

SEQ ID NO: 312387 - DNA, 25 bp, Probe Sequence
ttaaagctgtactgatgccctgaac

SEQ ID NO: 312388 - DNA, 25 bp, Probe Sequence
ttctgaagttggtggccgccatcaa

SEQ ID NO: 312389 - DNA, 25 bp, Probe Sequence
ttttgtccaggatggccctgacaag

SEQ ID NO: 312390 - DNA, 25 bp, Probe Sequence
ttttgctctgaacatcgcccaaaga

SEQ ID NO: 312391 - DNA, 25 bp, Probe Sequence
ttatttctgaggccaagcccgaagg

SEQ ID NO: 312392 - DNA, 25 bp, Probe Sequence
ttattcaaatggcccctccagaaag

SEQ ID NO: 312393 - DNA, 25 bp, Probe Sequence
ttatgagcatcaagtcctcacccag

SEQ ID NO: 312394 - DNA, 25 bp, Probe Sequence
ttgctgaatgcttgctacgagcggt

SEQ ID NO: 312395 - DNA, 25 bp, Probe Sequence
ttatgagctgcttgtttgagtggtg

SEQ ID NO: 312396 - DNA, 25 bp, Probe Sequence
ttatgtctcatgttttgacttcaga

SEQ ID NO: 312397 - DNA, 25 bp, Probe Sequence
ttactctgcaaaatatgagtccaga

SEQ ID NO: 312398 - DNA, 25 bp, Probe Sequence
ttacatccaatttcaatggccgttt

SEQ ID NO: 312399 - DNA, 25 bp, Probe Sequence
ttatacctattgttcatgccacgtt

SEQ ID NO: 312400 - DNA, 25 bp, Probe Sequence
ttatccttctggtccagcgcaagga

SEQ ID NO: 312401 - DNA, 25 bp, Probe Sequence
ttatccttgctggggatgagtcaga

SEQ ID NO: 312402 - DNA, 25 bp, Probe Sequence
ttatccttgtactttgaggagaagt

SEQ ID NO: 312403 - DNA, 25 bp, Probe Sequence
ttcacccgaacagttggaaggatct

SEQ ID NO: 312404 - DNA, 25 bp, Probe Sequence
ttcacctctaaatattacgtactca

SEQ ID NO: 312405 - DNA, 25 bp, Probe Sequence
ttccccagcaattaaaacggactca

SEQ ID NO: 312406 - DNA, 25 bp, Probe Sequence
ttctctcctcgataaaacggaggca

SEQ ID NO: 312407 - DNA, 25 bp, Probe Sequence
ttcttccctgtatctaactggggct

SEQ ID NO: 312408 - DNA, 25 bp, Probe Sequence
ttcttcccttttacatactgctgtc

SEQ ID NO: 312409 - DNA, 25 bp, Probe Sequence
ttcctccccttctctgaaatgggta

SEQ ID NO: 312410 - DNA, 25 bp, Probe Sequence
ttacccaccttatgtgactagggtg

SEQ ID NO: 312411 - DNA, 25 bp, Probe Sequence
ttacccacacacgaaggaaagcagg

SEQ ID NO: 312412 - DNA, 25 bp, Probe Sequence
ttagaagccacccaaggaattagga

SEQ ID NO: 312413 - DNA, 25 bp, Probe Sequence
ttagacccaccactaggtcatctta

SEQ ID NO: 312414 - DNA, 25 bp, Probe Sequence
ttgaaaccccattacttcatccaga

SEQ ID NO: 312415 - DNA, 25 bp, Probe Sequence
ttagaacctgacacactgattccca

SEQ ID NO: 312416 - DNA, 25 bp, Probe Sequence
ttagtaactatgactgacgtcccca

SEQ ID NO: 312417 - DNA, 25 bp, Probe Sequence
ttagtcacaactcctgagtgtcccg

SEQ ID NO: 312418 - DNA, 25 bp, Probe Sequence
ttgagacctacaggctgacgttccg

SEQ ID NO: 312419 - DNA, 25 bp, Probe Sequence
ttagcctctggctgtaagcttcggt

SEQ ID NO: 312420 - DNA, 25 bp, Probe Sequence
ttagccttggcgttactgttggact

SEQ ID NO: 312421 - DNA, 25 bp, Probe Sequence
ttatcactgtagcttttctgggact

SEQ ID NO: 312422 - DNA, 25 bp, Probe Sequence
ttatcccaagcctttatgcttgagt

SEQ ID NO: 312423 - DNA, 25 bp, Probe Sequence
ttaaacgagacgggtgcatctgcgt

SEQ ID NO: 312424 - DNA, 25 bp, Probe Sequence
ttagagcacggagtccgtccagttg

SEQ ID NO: 312425 - DNA, 25 bp, Probe Sequence
ttagagcacggagtccgtccagttg

SEQ ID NO: 312426 - DNA, 25 bp, Probe Sequence
ttagaatgtggctgggcccatattg

SEQ ID NO: 312427 - DNA, 25 bp, Probe Sequence
ttcagggcttcacaggccagtactg

SEQ ID NO: 312428 - DNA, 25 bp, Probe Sequence
ttcaggtcattcccaagtaaattta

SEQ ID NO: 312429 - DNA, 25 bp, Probe Sequence
ttaggaactgctgaagtaacttctt

SEQ ID NO: 312430 - DNA, 25 bp, Probe Sequence
ttaggaactgcatctggtaacccac

SEQ ID NO: 312431 - DNA, 25 bp, Probe Sequence
ttaagcaacatctttttaacctgca

SEQ ID NO: 312432 - DNA, 25 bp, Probe Sequence
ttaagcaacatctttttaacctgca

SEQ ID NO: 312433 - DNA, 25 bp, Probe Sequence
ttagccaactttctgtgaaggccaa

SEQ ID NO: 312434 - DNA, 25 bp, Probe Sequence
ttaccaccctggggcagaaggacag

SEQ ID NO: 312435 - DNA, 25 bp, Probe Sequence
ttgaaaccttccctgaataggccag

SEQ ID NO: 312436 - DNA, 25 bp, Probe Sequence
ttcaaacttcctgtggtagtgctcc

SEQ ID NO: 312437 - DNA, 25 bp, Probe Sequence
ttagagatttggggggctctggccc

SEQ ID NO: 312438 - DNA, 25 bp, Probe Sequence
ttagggttgtgactggctttggtgc

SEQ ID NO: 312439 - DNA, 25 bp, Probe Sequence
ttataggcggtgggttctgcagggc

SEQ ID NO: 312440 - DNA, 25 bp, Probe Sequence
ttacgccaagctgattttgaggccc

SEQ ID NO: 312441 - DNA, 25 bp, Probe Sequence
ttaagctaagcccttactagaccaa

SEQ ID NO: 312442 - DNA, 25 bp, Probe Sequence
ttaggttagccagtgtgactatgca

SEQ ID NO: 312443 - DNA, 25 bp, Probe Sequence
ttatgagattgagagtggacttaca

SEQ ID NO: 312444 - DNA, 25 bp, Probe Sequence
ttgtggattgacagtagtcccctcc

SEQ ID NO: 312445 - DNA, 25 bp, Probe Sequence
ttgtggattgacagtagtcccctcc

SEQ ID NO: 312446 - DNA, 25 bp, Probe Sequence
ttatggatttctgtattccttctcc

SEQ ID NO: 312447 - DNA, 25 bp, Probe Sequence
ttattattactgtttgtcttctccc

SEQ ID NO: 312448 - DNA, 25 bp, Probe Sequence
ttattatctttcttgatactttcca

SEQ ID NO: 312449 - DNA, 25 bp, Probe Sequence
ttattattttgcttacatgtgcttt

SEQ ID NO: 312450 - DNA, 25 bp, Probe Sequence
ttattactcctgtagaagtctttgc

SEQ ID NO: 312451 - DNA, 25 bp, Probe Sequence
ttttgacctgtgtagaactctctgg

SEQ ID NO: 312452 - DNA, 25 bp, Probe Sequence
ttattacttgtgactggacctctgg

SEQ ID NO: 312453 - DNA, 25 bp, Probe Sequence
ttattacctaatggagatccatctg

SEQ ID NO: 312454 - DNA, 25 bp, Probe Sequence
ttatatacctcattctgacacctgc

SEQ ID NO: 312455 - DNA, 25 bp, Probe Sequence
ttattgccaatctttgaactcattc

SEQ ID NO: 312456 - DNA, 25 bp, Probe Sequence
ttattcgcctctttgacacacaatc

SEQ ID NO: 312457 - DNA, 25 bp, Probe Sequence
ttattcgcctctttgacacacaatc

SEQ ID NO: 312458 - DNA, 25 bp, Probe Sequence
ttattattgcctttatccagcagtg

SEQ ID NO: 312459 - DNA, 25 bp, Probe Sequence
ttatgtctctgttttatccagtggt

SEQ ID NO: 312460 - DNA, 25 bp, Probe Sequence
ttatacacagctttatgatatcaaa

SEQ ID NO: 312461 - DNA, 25 bp, Probe Sequence
ttattccagctttcagctggccgca

SEQ ID NO: 312462 - DNA, 25 bp, Probe Sequence
ttatctgtatcggtcagggtccagt

SEQ ID NO: 312463 - DNA, 25 bp, Probe Sequence
ttatgtaatctcttcgggatctcag

SEQ ID NO: 312464 - DNA, 25 bp, Probe Sequence
ttattaacagttttggatccattca

SEQ ID NO: 312465 - DNA, 25 bp, Probe Sequence
ttagtaatgagtatgaggagaagta

SEQ ID NO: 312466 - DNA, 25 bp, Probe Sequence
ttattaatatgaatggggccaactg

SEQ ID NO: 312467 - DNA, 25 bp, Probe Sequence
ttttgtcatataaggaatcccatta

SEQ ID NO: 312468 - DNA, 25 bp, Probe Sequence
ttttgtctcatcaggattgttttaa

SEQ ID NO: 312469 - DNA, 25 bp, Probe Sequence
ttatatgccaacacgttatctttat

SEQ ID NO: 312470 - DNA, 25 bp, Probe Sequence
ttatatgaagcctgccttactttgt

SEQ ID NO: 312471 - DNA, 25 bp, Probe Sequence
ttattggatgcacttgcttcttttt

SEQ ID NO: 312472 - DNA, 25 bp, Probe Sequence
ttattgggctcagtgctgtaggtct

SEQ ID NO: 312473 - DNA, 25 bp, Probe Sequence
ttagggcgctcagcatgtatgaaga

SEQ ID NO: 312474 - DNA, 25 bp, Probe Sequence
ttaggcgagtaccatttgcacaatc

SEQ ID NO: 312475 - DNA, 25 bp, Probe Sequence
ttatggggcacaacatttgctgcga

SEQ ID NO: 312476 - DNA, 25 bp, Probe Sequence
ttaggggacatgttctctgcaggac

SEQ ID NO: 312477 - DNA, 25 bp, Probe Sequence
ttagccgggcatggtgacgggcacc

SEQ ID NO: 312478 - DNA, 25 bp, Probe Sequence
ttacatcgccctgaacgaggacctg

SEQ ID NO: 312479 - DNA, 25 bp, Probe Sequence
ttatatctccctgtcgtaggcagct

SEQ ID NO: 312480 - DNA, 25 bp, Probe Sequence
ttattctcagccattttgggcatat

SEQ ID NO: 312481 - DNA, 25 bp, Probe Sequence
ttatgattcaccctctttggagaac

SEQ ID NO: 312482 - DNA, 25 bp, Probe Sequence
ttatgattattccttgtctgtactt

SEQ ID NO: 312483 - DNA, 25 bp, Probe Sequence
ttatgatgtttctgttgtgctgcct

SEQ ID NO: 312484 - DNA, 25 bp, Probe Sequence
ttatgagttatttagaggcatgcca

SEQ ID NO: 312485 - DNA, 25 bp, Probe Sequence
ttatagtgtttaactggcatggatt

SEQ ID NO: 312486 - DNA, 25 bp, Probe Sequence
ttattccttctaacgtgtgagatgt

SEQ ID NO: 312487 - DNA, 25 bp, Probe Sequence
ttatctacattgaacgggtgcagcg

SEQ ID NO: 312488 - DNA, 25 bp, Probe Sequence
ttatccattgcgatctggggagccc

SEQ ID NO: 312489 - DNA, 25 bp, Probe Sequence
ttagcaccgcaggtgtagagaaggc

SEQ ID NO: 312490 - DNA, 25 bp, Probe Sequence
ttatcatctctctctatcacagaga

SEQ ID NO: 312491 - DNA, 25 bp, Probe Sequence
ttatccatcttggtgcatcctgaca

SEQ ID NO: 312492 - DNA, 25 bp, Probe Sequence
ttatggaccgctagcatctgtcact

SEQ ID NO: 312493 - DNA, 25 bp, Probe Sequence
ttatcagcactttatgcacgtatta

SEQ ID NO: 312494 - DNA, 25 bp, Probe Sequence
ttactgcagcttccacttcatatta

SEQ ID NO: 312495 - DNA, 25 bp, Probe Sequence
ttagatgcagcatccagctcttgca

SEQ ID NO: 312496 - DNA, 25 bp, Probe Sequence
ttatgatatcaaagactcattgctt

SEQ ID NO: 312497 - DNA, 25 bp, Probe Sequence
ttataaaagtgttcattgtttcgta

SEQ ID NO: 312498 - DNA, 25 bp, Probe Sequence
ttattaaaatgttgttggttctgta

SEQ ID NO: 312499 - DNA, 25 bp, Probe Sequence
ttaaacaaaatttcacagttctgta

SEQ ID NO: 312500 - DNA, 25 bp, Probe Sequence
ttaaagaaaattgaccaggcgtggt

SEQ ID NO: 312501 - DNA, 25 bp, Probe Sequence
ttcaacagaaaagaacggtggcttt

SEQ ID NO: 312502 - DNA, 25 bp, Probe Sequence
ttcagaaggcactaaaggtggtggt

SEQ ID NO: 312503 - DNA, 25 bp, Probe Sequence
ttagagacgattacaagcggaggcg

SEQ ID NO: 312504 - DNA, 25 bp, Probe Sequence
ttagatgtcgtatccggagagagct

SEQ ID NO: 312505 - DNA, 25 bp, Probe Sequence
ttagattgagaaagccgtgtgagtt

SEQ ID NO: 312506 - DNA, 25 bp, Probe Sequence
ttagattagcagaacgctcttgaaa

SEQ ID NO: 312507 - DNA, 25 bp, Probe Sequence
ttacctacatggaccagttgcaaat

SEQ ID NO: 312508 - DNA, 25 bp, Probe Sequence
ttatctatcacagaccagtagcaaa

SEQ ID NO: 312509 - DNA, 25 bp, Probe Sequence
ttatttcgttaccactgcatgcaaa

SEQ ID NO: 312510 - DNA, 25 bp, Probe Sequence
ttatttattttgcagcgagcacatg

SEQ ID NO: 312511 - DNA, 25 bp, Probe Sequence
ttaggtgatgctttggacagaacag

SEQ ID NO: 312512 - DNA, 25 bp, Probe Sequence
ttggggttcgtgcacaacacagctt

SEQ ID NO: 312513 - DNA, 25 bp, Probe Sequence
ttccgtcccgtgcacaataagagcg

SEQ ID NO: 312514 - DNA, 25 bp, Probe Sequence
ttgccgtcggcgagtacaacaaagc

SEQ ID NO: 312515 - DNA, 25 bp, Probe Sequence
ttacagtcggcatcaaccaaccaca

SEQ ID NO: 312516 - DNA, 25 bp, Probe Sequence
ttataggcgtgagccaccacgcccc

SEQ ID NO: 312517 - DNA, 25 bp, Probe Sequence
ttgaagggtgttcacccatcccacc

SEQ ID NO: 312518 - DNA, 25 bp, Probe Sequence
ttgacgggacttcaggttctttctg

SEQ ID NO: 312519 - DNA, 25 bp, Probe Sequence
ttggagggtttagagattcttacta

SEQ ID NO: 312520 - DNA, 25 bp, Probe Sequence
ttggtgggtttaaaactttgctgct

SEQ ID NO: 312521 - DNA, 25 bp, Probe Sequence
ttattcaggttctaaccctttgctg

SEQ ID NO: 312522 - DNA, 25 bp, Probe Sequence
ttattctgagtcctaactgccatct

SEQ ID NO: 312523 - DNA, 25 bp, Probe Sequence
ttatccatgtggttaactggactga

SEQ ID NO: 312524 - DNA, 25 bp, Probe Sequence
ttatcctgtggcgttgcctggacat

SEQ ID NO: 312525 - DNA, 25 bp, Probe Sequence
ttatcactggacattcaggaggcaa

SEQ ID NO: 312526 - DNA, 25 bp, Probe Sequence
ttatctctgtgacctgccagggaga

SEQ ID NO: 312527 - DNA, 25 bp, Probe Sequence
ttatctctgtccagtcaggtgtgtg

SEQ ID NO: 312528 - DNA, 25 bp, Probe Sequence
ttttggtctcatctggagtggggaa

SEQ ID NO: 312529 - DNA, 25 bp, Probe Sequence
ttcttttccatgtatgaggaggggg

SEQ ID NO: 312530 - DNA, 25 bp, Probe Sequence
ttatgtggtccgaatcagtggtggg

SEQ ID NO: 312531 - DNA, 25 bp, Probe Sequence
ttaggttcctgaaactggtggcaac

SEQ ID NO: 312532 - DNA, 25 bp, Probe Sequence
ttaggagttcgagaccagcctgacc

SEQ ID NO: 312533 - DNA, 25 bp, Probe Sequence
ttaaggttggagccatccagcgctg

SEQ ID NO: 312534 - DNA, 25 bp, Probe Sequence
ttaaagtgtcacccctcactgtgac

SEQ ID NO: 312535 - DNA, 25 bp, Probe Sequence
ttcttagagtacatcctcctgttat

SEQ ID NO: 312536 - DNA, 25 bp, Probe Sequence
ttattaaaacttgtcctgattgcca

SEQ ID NO: 312537 - DNA, 25 bp, Probe Sequence
ttatctaaaatctttctattatatc

SEQ ID NO: 312538 - DNA, 25 bp, Probe Sequence
ttatctaatgtttctctaattttta

SEQ ID NO: 312539 - DNA, 25 bp, Probe Sequence
ttataagatattcccgctttctgtt

SEQ ID NO: 312540 - DNA, 25 bp, Probe Sequence
ttatttaattgtccggtttgtcttg

SEQ ID NO: 312541 - DNA, 25 bp, Probe Sequence
ttaactatattgattcgtttactag

SEQ ID NO: 312542 - DNA, 25 bp, Probe Sequence
ttagcactcatttaaccctgttagc

SEQ ID NO: 312543 - DNA, 25 bp, Probe Sequence
ttatagtcattctaactgcactttg

SEQ ID NO: 312544 - DNA, 25 bp, Probe Sequence
ttagatgaattgtacggcacttggc

SEQ ID NO: 312545 - DNA, 25 bp, Probe Sequence
ttagtggattgagccctcttggaaa

SEQ ID NO: 312546 - DNA, 25 bp, Probe Sequence
ttaggtttgcaagcctcctgatcag

SEQ ID NO: 312547 - DNA, 25 bp, Probe Sequence
ttagagtgtctaaggactcctgaga

SEQ ID NO: 312548 - DNA, 25 bp, Probe Sequence
ttaagatttttgggtcctgagccag

SEQ ID NO: 312549 - DNA, 25 bp, Probe Sequence
ttataattttcagtttctccccatg

SEQ ID NO: 312550 - DNA, 25 bp, Probe Sequence
ttataattttcagtttctccccatg

SEQ ID NO: 312551 - DNA, 25 bp, Probe Sequence
ttattatttgctatctttcccacta

SEQ ID NO: 312552 - DNA, 25 bp, Probe Sequence
ttatttaaagcaatgtttacccaca

SEQ ID NO: 312553 - DNA, 25 bp, Probe Sequence
ttattttaactatttcttcgaacat

SEQ ID NO: 312554 - DNA, 25 bp, Probe Sequence
ttatgtttaccttccttactagact

SEQ ID NO: 312555 - DNA, 25 bp, Probe Sequence
ttattttgcacctgcctgaaatata

SEQ ID NO: 312556 - DNA, 25 bp, Probe Sequence
ttattattcaactggtctaaaaact

SEQ ID NO: 312557 - DNA, 25 bp, Probe Sequence
ttattatttctctcctcgataaaac

SEQ ID NO: 312558 - DNA, 25 bp, Probe Sequence
ttatttttgtcccctagattgagtt

SEQ ID NO: 312559 - DNA, 25 bp, Probe Sequence
ttaatttttcagttctagcttagtc

SEQ ID NO: 312560 - DNA, 25 bp, Probe Sequence
ttgagacctttagctaacttagtgc

SEQ ID NO: 312561 - DNA, 25 bp, Probe Sequence
ttgggcacgtaaactaagttggtca

SEQ ID NO: 312562 - DNA, 25 bp, Probe Sequence
ttcccaggtaatttaaattggtcat

SEQ ID NO: 312563 - DNA, 25 bp, Probe Sequence
ttaccaggttttaaacttcgccatg

SEQ ID NO: 312564 - DNA, 25 bp, Probe Sequence
ttaatgggttttcacagtccagctt

SEQ ID NO: 312565 - DNA, 25 bp, Probe Sequence
ttttggggaaatctgagcctagctc

SEQ ID NO: 312566 - DNA, 25 bp, Probe Sequence
ttttggaggcagaagctctggcccc

SEQ ID NO: 312567 - DNA, 25 bp, Probe Sequence
ttttggaggcagaagctctggcccc

SEQ ID NO: 312568 - DNA, 25 bp, Probe Sequence
ttttggcctcagagtctctgatcaa

SEQ ID NO: 312569 - DNA, 25 bp, Probe Sequence
ttttggcacgcgaaagtcaacggga

SEQ ID NO: 312570 - DNA, 25 bp, Probe Sequence
ttcttggaggggacgtcaccctggc

SEQ ID NO: 312571 - DNA, 25 bp, Probe Sequence
ttcctccggtggacgacaagcacct

SEQ ID NO: 312572 - DNA, 25 bp, Probe Sequence
ttatctccggctggggcaataccct

SEQ ID NO: 312573 - DNA, 25 bp, Probe Sequence
ttatgtcgctgcctgtgaggcacat

SEQ ID NO: 312574 - DNA, 25 bp, Probe Sequence
ttatgtgcgcatcctgagcaccatc

SEQ ID NO: 312575 - DNA, 25 bp, Probe Sequence
ttatctgctgcatcacatacaacat

SEQ ID NO: 312576 - DNA, 25 bp, Probe Sequence
ttatcaccaagccaaacatcatcat

SEQ ID NO: 312577 - DNA, 25 bp, Probe Sequence
ttatacccgagagacatccatcatc

SEQ ID NO: 312578 - DNA, 25 bp, Probe Sequence
ttattgcggggagacagctctctct

SEQ ID NO: 312579 - DNA, 25 bp, Probe Sequence
ttttggaggacattagcattctttc

SEQ ID NO: 312580 - DNA, 25 bp, Probe Sequence
ttttggtggactgtgatttttccag

SEQ ID NO: 312581 - DNA, 25 bp, Probe Sequence
ttatctgtgttaccctgtttttcta

SEQ ID NO: 312582 - DNA, 25 bp, Probe Sequence
ttatcttggtatgtccttttttaga

SEQ ID NO: 312583 - DNA, 25 bp, Probe Sequence
ttattgtctatatccccttttataa

SEQ ID NO: 312584 - DNA, 25 bp, Probe Sequence
ttaggacttcattcctccatgtttt

SEQ ID NO: 312585 - DNA, 25 bp, Probe Sequence
ttaggagcaataatgccttatggta

SEQ ID NO: 312586 - DNA, 25 bp, Probe Sequence
ttaggtatgtttcttctactaccag

SEQ ID NO: 312587 - DNA, 25 bp, Probe Sequence
ttagtctatgtttgaattccccacc

SEQ ID NO: 312588 - DNA, 25 bp, Probe Sequence
ttattgctgtgttcaaaccaccccc

SEQ ID NO: 312589 - DNA, 25 bp, Probe Sequence
ttagagcttttcagaacatccccac

SEQ ID NO: 312590 - DNA, 25 bp, Probe Sequence
ttagtcgtattctgctactcgaaca

SEQ ID NO: 312591 - DNA, 25 bp, Probe Sequence
ttagtagtccactttatgcttaaaa

SEQ ID NO: 312592 - DNA, 25 bp, Probe Sequence
ttatgtaactatcttatgcttcaaa

SEQ ID NO: 312593 - DNA, 25 bp, Probe Sequence
ttaggcatactagagacatttcaag

SEQ ID NO: 312594 - DNA, 25 bp, Probe Sequence
ttagctcaattatagcattgtgcta

SEQ ID NO: 312595 - DNA, 25 bp, Probe Sequence
ttagatccagaattatgccaggcat

SEQ ID NO: 312596 - DNA, 25 bp, Probe Sequence
ttaggccagagtgatggcaccatca

SEQ ID NO: 312597 - DNA, 25 bp, Probe Sequence
ttgatggcctaataacctgcaatag

SEQ ID NO: 312598 - DNA, 25 bp, Probe Sequence
ttaggcttacaatgtgcactgaatc

SEQ ID NO: 312599 - DNA, 25 bp, Probe Sequence
ttatgggctatttggctggtgagac

SEQ ID NO: 312600 - DNA, 25 bp, Probe Sequence
ttaggatctatgtgagcttgagaaa

SEQ ID NO: 312601 - DNA, 25 bp, Probe Sequence
ttattgacaatctggctgctggcct

SEQ ID NO: 312602 - DNA, 25 bp, Probe Sequence
ttattgacaatctggctgctggcct

SEQ ID NO: 312603 - DNA, 25 bp, Probe Sequence
ttattgacaatctggctgctggcct

SEQ ID NO: 312604 - DNA, 25 bp, Probe Sequence
ttattctcaccatgagtgctggctt

SEQ ID NO: 312605 - DNA, 25 bp, Probe Sequence
ttattggctggacgaggtggctcat

SEQ ID NO: 312606 - DNA, 25 bp, Probe Sequence
ttataggctgggccaggtggctccc

SEQ ID NO: 312607 - DNA, 25 bp, Probe Sequence
ttacaagctggactcagggatcctc

SEQ ID NO: 312608 - DNA, 25 bp, Probe Sequence
ttatgcttctgaactcgggtttctt

SEQ ID NO: 312609 - DNA, 25 bp, Probe Sequence
ttattgctgagaacacggagtgctt

SEQ ID NO: 312610 - DNA, 25 bp, Probe Sequence
ttatctgtgagaatcctgtgggacc

SEQ ID NO: 312611 - DNA, 25 bp, Probe Sequence
ttacaggagtaccagacgtggctgg

SEQ ID NO: 312612 - DNA, 25 bp, Probe Sequence
ttacgagagcctctgtcgtggggag

SEQ ID NO: 312613 - DNA, 25 bp, Probe Sequence
ttatctggaggcaacttctggtggt

SEQ ID NO: 312614 - DNA, 25 bp, Probe Sequence
ttatccagagatacacttccttgtt

SEQ ID NO: 312615 - DNA, 25 bp, Probe Sequence
ttatccaaatattattgtctagcat

SEQ ID NO: 312616 - DNA, 25 bp, Probe Sequence
ttatacaaatcactatcgctctatc

SEQ ID NO: 312617 - DNA, 25 bp, Probe Sequence
ttatcaacatcatattcagcccatc

SEQ ID NO: 312618 - DNA, 25 bp, Probe Sequence
ttatccacatgaaatgtgtgcccat

SEQ ID NO: 312619 - DNA, 25 bp, Probe Sequence
ttatccgagagagtgagagcgctcc

SEQ ID NO: 312620 - DNA, 25 bp, Probe Sequence
ttatcatgccagtaggagaaatctc

SEQ ID NO: 312621 - DNA, 25 bp, Probe Sequence
ttatgtccacaatggaatcacctaa

SEQ ID NO: 312622 - DNA, 25 bp, Probe Sequence
ttagtccacttgggtcatcagctct

SEQ ID NO: 312623 - DNA, 25 bp, Probe Sequence
ttatgtaccttagttctgagttaga

SEQ ID NO: 312624 - DNA, 25 bp, Probe Sequence
ttatgtgatcaataaatcttttaca

SEQ ID NO: 312625 - DNA, 25 bp, Probe Sequence
ttagtcataaaacaccatcattaag

SEQ ID NO: 312626 - DNA, 25 bp, Probe Sequence
ttattcttagaacacctgatacaat

SEQ ID NO: 312627 - DNA, 25 bp, Probe Sequence
ttattatataaagcccagtaaagaa

SEQ ID NO: 312628 - DNA, 25 bp, Probe Sequence
ttatgtaatacaacccactggaaaa

SEQ ID NO: 312629 - DNA, 25 bp, Probe Sequence
ttatgaaatgcacgacaccctggga

SEQ ID NO: 312630 - DNA, 25 bp, Probe Sequence
ttataattagtgttcccatgtggag

SEQ ID NO: 312631 - DNA, 25 bp, Probe Sequence
ttataatctatacttccctcacgag

SEQ ID NO: 312632 - DNA, 25 bp, Probe Sequence
ttatatatttagcctgtcacaacag

SEQ ID NO: 312633 - DNA, 25 bp, Probe Sequence
ttattcatgagtccgtatcaacgct

SEQ ID NO: 312634 - DNA, 25 bp, Probe Sequence
ttattatggctgatgtattactgtg

SEQ ID NO: 312635 - DNA, 25 bp, Probe Sequence
ttattatggctgatgtattactgtg

SEQ ID NO: 312636 - DNA, 25 bp, Probe Sequence
ttattctggaggatatctaatgtga

SEQ ID NO: 312637 - DNA, 25 bp, Probe Sequence
ttagcatctgtggtgtctttaaggg

SEQ ID NO: 312638 - DNA, 25 bp, Probe Sequence
ttagcattgtagtgctttgagagag

SEQ ID NO: 312639 - DNA, 25 bp, Probe Sequence
ttatcttgctgaatccttctaaatt

SEQ ID NO: 312640 - DNA, 25 bp, Probe Sequence
ttatatgctttgacctactaacttt

SEQ ID NO: 312641 - DNA, 25 bp, Probe Sequence
ttatgacctctatttacttaacttc

SEQ ID NO: 312642 - DNA, 25 bp, Probe Sequence
ttatacctcttttactgtaacaagt

SEQ ID NO: 312643 - DNA, 25 bp, Probe Sequence
ttattcctcttgctaagtacaaata

SEQ ID NO: 312644 - DNA, 25 bp, Probe Sequence
ttaccctataataagagtaccgaag

SEQ ID NO: 312645 - DNA, 25 bp, Probe Sequence
ttattgcctataatggggtccccaa

SEQ ID NO: 312646 - DNA, 25 bp, Probe Sequence
ttattgcttcttaagggtccttgct

SEQ ID NO: 312647 - DNA, 25 bp, Probe Sequence
ttattttttttggcctgtttgatgt

SEQ ID NO: 312648 - DNA, 25 bp, Probe Sequence
ttatttagtttgagctctgtaggta

SEQ ID NO: 312649 - DNA, 25 bp, Probe Sequence
ttatcttttttgagagtgtccgaag

SEQ ID NO: 312650 - DNA, 25 bp, Probe Sequence
ttacttttctcccaaatgacccaga

SEQ ID NO: 312651 - DNA, 25 bp, Probe Sequence
ttaattgtccttttagtagccaaga

SEQ ID NO: 312652 - DNA, 25 bp, Probe Sequence
ttattttctttgtttctgactctaa

SEQ ID NO: 312653 - DNA, 25 bp, Probe Sequence
ttatttttgtttttaatgctttgat

SEQ ID NO: 312654 - DNA, 25 bp, Probe Sequence
ttatcctgtttcctgtttactttgt

SEQ ID NO: 312655 - DNA, 25 bp, Probe Sequence
ttacttgtattcctaactgttttgt

SEQ ID NO: 312656 - DNA, 25 bp, Probe Sequence
ttaccttacatgactaattttttgt

SEQ ID NO: 312657 - DNA, 25 bp, Probe Sequence
ttacctatcttgctattttttagag

SEQ ID NO: 312658 - DNA, 25 bp, Probe Sequence
ttagctgtactgtgtgatatttttc

SEQ ID NO: 312659 - DNA, 25 bp, Probe Sequence
ttagagaaatatgctatgagattgt

SEQ ID NO: 312660 - DNA, 25 bp, Probe Sequence
ttagaaattatggctcaggagtgat

SEQ ID NO: 312661 - DNA, 25 bp, Probe Sequence
ttatgaattctctctcaagaagcaa

SEQ ID NO: 312662 - DNA, 25 bp, Probe Sequence
ttatgactcatatgactaaatagta

SEQ ID NO: 312663 - DNA, 25 bp, Probe Sequence
ttatgatctacatggcattaattga

SEQ ID NO: 312664 - DNA, 25 bp, Probe Sequence
ttatgatttcacacactggtccagg

SEQ ID NO: 312665 - DNA, 25 bp, Probe Sequence
ttattcttagcgtcactggtctggc

SEQ ID NO: 312666 - DNA, 25 bp, Probe Sequence
ttatccaaacagaactgtggtgtca

SEQ ID NO: 312667 - DNA, 25 bp, Probe Sequence
ttatctgagccactgtacttcgtta

SEQ ID NO: 312668 - DNA, 25 bp, Probe Sequence
ttatctatagcacttgatcatatgt

SEQ ID NO: 312669 - DNA, 25 bp, Probe Sequence
ttaccaatgctgcatcatctcagta

SEQ ID NO: 312670 - DNA, 25 bp, Probe Sequence
ttactgatcattcgatatgctaacc

SEQ ID NO: 312671 - DNA, 25 bp, Probe Sequence
ttacagataaagctgctaactcctg

SEQ ID NO: 312672 - DNA, 25 bp, Probe Sequence
ttacgctagaggtccaaagctgcct

SEQ ID NO: 312673 - DNA, 25 bp, Probe Sequence
ttatcccagctgcacagagacggct

SEQ ID NO: 312674 - DNA, 25 bp, Probe Sequence
ttatcccagctgcacagagacggct

SEQ ID NO: 312675 - DNA, 25 bp, Probe Sequence
ttatcctcacagccactgtggtggc

SEQ ID NO: 312676 - DNA, 25 bp, Probe Sequence
ttcacactagcaggatgagggtggc

SEQ ID NO: 312677 - DNA, 25 bp, Probe Sequence
ttaccaggcatggcagtgggcgcct

SEQ ID NO: 312678 - DNA, 25 bp, Probe Sequence
ttagttgaaccgtcagatcgcctgg

SEQ ID NO: 312679 - DNA, 25 bp, Probe Sequence
ttagtgaaccgtcagatcgcctgga

SEQ ID NO: 312680 - DNA, 25 bp, Probe Sequence
ttagagagacgcctacagacccagg

SEQ ID NO: 312681 - DNA, 25 bp, Probe Sequence
ttagaagggcgatcgcgagcggcaa

SEQ ID NO: 312682 - DNA, 25 bp, Probe Sequence
ttaaaaggccgccaggagggctggt

SEQ ID NO: 312683 - DNA, 25 bp, Probe Sequence
ttaaattttcttcagttggtgtgtt

SEQ ID NO: 312684 - DNA, 25 bp, Probe Sequence
ttaaattttcttcagttggtgtgtt

SEQ ID NO: 312685 - DNA, 25 bp, Probe Sequence
ttaaattgttttcagctcttggata

SEQ ID NO: 312686 - DNA, 25 bp, Probe Sequence
ttaaattttttctgctggtggataa

SEQ ID NO: 312687 - DNA, 25 bp, Probe Sequence
ttcaaactaaattttctaggctgaa

SEQ ID NO: 312688 - DNA, 25 bp, Probe Sequence
ttccaaatggaatgagtctcggtaa

SEQ ID NO: 312689 - DNA, 25 bp, Probe Sequence
ttccaaagcgagaggagccttctga

SEQ ID NO: 312690 - DNA, 25 bp, Probe Sequence
ttaaaatgaagctgtgacttttagg

SEQ ID NO: 312691 - DNA, 25 bp, Probe Sequence
ttaaactgggcatctggtttctaaa

SEQ ID NO: 312692 - DNA, 25 bp, Probe Sequence
ttatacaggggcttctgctctttgc

SEQ ID NO: 312693 - DNA, 25 bp, Probe Sequence
ttcttaggcccagttcctattgcac

SEQ ID NO: 312694 - DNA, 25 bp, Probe Sequence
ttctgtagtcccggttaaccagctg

SEQ ID NO: 312695 - DNA, 25 bp, Probe Sequence
ttagtagagacagggtttcaccgtg

SEQ ID NO: 312696 - DNA, 25 bp, Probe Sequence
ttggaaatggggcttacactatgat

SEQ ID NO: 312697 - DNA, 25 bp, Probe Sequence
ttagaacaggggcttgtcatgaact

SEQ ID NO: 312698 - DNA, 25 bp, Probe Sequence
ttagcctcaggtggcagatgtttga

SEQ ID NO: 312699 - DNA, 25 bp, Probe Sequence
ttagcagtcgcgagcacatgttcat

SEQ ID NO: 312700 - DNA, 25 bp, Probe Sequence
ttatgcaggcatggaactcaagatt

SEQ ID NO: 312701 - DNA, 25 bp, Probe Sequence
ttagggctgcgtgctcaagagtctg

SEQ ID NO: 312702 - DNA, 25 bp, Probe Sequence
ttagaggctcttggacacacagtgt

SEQ ID NO: 312703 - DNA, 25 bp, Probe Sequence
ttagcagctctctccaaagctgtct

SEQ ID NO: 312704 - DNA, 25 bp, Probe Sequence
ttacgtattctccaaagcagtgttc

SEQ ID NO: 312705 - DNA, 25 bp, Probe Sequence
ttacgccttacgactacagccagtc

SEQ ID NO: 312706 - DNA, 25 bp, Probe Sequence
ttaccgcgtgtactacaatgccggc

SEQ ID NO: 312707 - DNA, 25 bp, Probe Sequence
ttatcccctgtatttagtcaccagt

SEQ ID NO: 312708 - DNA, 25 bp, Probe Sequence
ttattccctgaattgtttgatattg

SEQ ID NO: 312709 - DNA, 25 bp, Probe Sequence
ttattctccatgtggtcttcttctg

SEQ ID NO: 312710 - DNA, 25 bp, Probe Sequence
ttagtgcctgtgtggatttttgtga

SEQ ID NO: 312711 - DNA, 25 bp, Probe Sequence
ttattactggatttgtcatttttga

SEQ ID NO: 312712 - DNA, 25 bp, Probe Sequence
ttattacccttattatctatgttac

SEQ ID NO: 312713 - DNA, 25 bp, Probe Sequence
ttattatttgctttagattattgta

SEQ ID NO: 312714 - DNA, 25 bp, Probe Sequence
ttattttctggattgcaattttgtt

SEQ ID NO: 312715 - DNA, 25 bp, Probe Sequence
ttattatttggatgtatatcagtgg

SEQ ID NO: 312716 - DNA, 25 bp, Probe Sequence
ttatttatgtggggccgtgcaggca

SEQ ID NO: 312717 - DNA, 25 bp, Probe Sequence
ttacgtatgtaggcccagtcgtcat

SEQ ID NO: 312718 - DNA, 25 bp, Probe Sequence
ttagtaatgtaagaattcttcattt

SEQ ID NO: 312719 - DNA, 25 bp, Probe Sequence
ttatgaaatgtacttccctccatct

SEQ ID NO: 312720 - DNA, 25 bp, Probe Sequence
ttatgaatgatttttctccttttgc

SEQ ID NO: 312721 - DNA, 25 bp, Probe Sequence
ttatggtgcactttttcgctattta

SEQ ID NO: 312722 - DNA, 25 bp, Probe Sequence
ttatggcagatgtgtgttactttta

SEQ ID NO: 312723 - DNA, 25 bp, Probe Sequence
ttagggtgatgtgttccttctcttc

SEQ ID NO: 312724 - DNA, 25 bp, Probe Sequence
ttcaaggatgttgtccgatttaatc

SEQ ID NO: 312725 - DNA, 25 bp, Probe Sequence
ttataggtgtttccacatgaattaa

SEQ ID NO: 312726 - DNA, 25 bp, Probe Sequence
ttatcaggtgttaacatctgtttca

SEQ ID NO: 312727 - DNA, 25 bp, Probe Sequence
ttataggatctcattactgtttgct

SEQ ID NO: 312728 - DNA, 25 bp, Probe Sequence
ttataggactcattctgaccagttt

SEQ ID NO: 312729 - DNA, 25 bp, Probe Sequence
ttagcaggactgttctactcagcct

SEQ ID NO: 312730 - DNA, 25 bp, Probe Sequence
ttagcttgaaagttactgctgctct

SEQ ID NO: 312731 - DNA, 25 bp, Probe Sequence
ttatgtgtgaaagcatcctcttccg

SEQ ID NO: 312732 - DNA, 25 bp, Probe Sequence
ttagtgctgaaaggtcaggcttaag

SEQ ID NO: 312733 - DNA, 25 bp, Probe Sequence
ttatgactatcaagggagcagttta

SEQ ID NO: 312734 - DNA, 25 bp, Probe Sequence
ttattcttatcactgtacttgttag

SEQ ID NO: 312735 - DNA, 25 bp, Probe Sequence
ttacctttaggttggatgtatgaag

SEQ ID NO: 312736 - DNA, 25 bp, Probe Sequence
ttacctaggaggtgagtgccaggaa

SEQ ID NO: 312737 - DNA, 25 bp, Probe Sequence
ttacctaggaggtgagtgccaggaa

SEQ ID NO: 312738 - DNA, 25 bp, Probe Sequence
ttagttaggggaagggagcaggaag

SEQ ID NO: 312739 - DNA, 25 bp, Probe Sequence
ttcagtccaggaccaaggctcaggg

SEQ ID NO: 312740 - DNA, 25 bp, Probe Sequence
ttaggccaggcacagtggctcagcc

SEQ ID NO: 312741 - DNA, 25 bp, Probe Sequence
ttaggtcaggccaatggtcacagac

SEQ ID NO: 312742 - DNA, 25 bp, Probe Sequence
ttctggttggtgactgaggcagcaa

SEQ ID NO: 312743 - DNA, 25 bp, Probe Sequence
ttatggctgtggcaaaggcaaaaga

SEQ ID NO: 312744 - DNA, 25 bp, Probe Sequence
ttccgtgctgtgtaggggctaacaa

SEQ ID NO: 312745 - DNA, 25 bp, Probe Sequence
ttgaactggcagtcggggtcaactt

SEQ ID NO: 312746 - DNA, 25 bp, Probe Sequence
ttcccattgagtctggatgaaatct

SEQ ID NO: 312747 - DNA, 25 bp, Probe Sequence
ttatccttaggactctgcattaact

SEQ ID NO: 312748 - DNA, 25 bp, Probe Sequence
ttagcctataggtttctccatacgt

SEQ ID NO: 312749 - DNA, 25 bp, Probe Sequence
ttatgcctctaactttttacagcct

SEQ ID NO: 312750 - DNA, 25 bp, Probe Sequence
ttagcacctttcttctgttcaagtt

SEQ ID NO: 312751 - DNA, 25 bp, Probe Sequence
ttacccttgactttgctgaaatttg

SEQ ID NO: 312752 - DNA, 25 bp, Probe Sequence
ttaccctgtgacatttaaatatact

SEQ ID NO: 312753 - DNA, 25 bp, Probe Sequence
ttacccggcccttattcaaggatct

SEQ ID NO: 312754 - DNA, 25 bp, Probe Sequence
ttacccgtgcccgatttgaagaact

SEQ ID NO: 312755 - DNA, 25 bp, Probe Sequence
ttaggcctagcaacgcttgtaggac

SEQ ID NO: 312756 - DNA, 25 bp, Probe Sequence
ttatccctagccaagcttcaaggca

SEQ ID NO: 312757 - DNA, 25 bp, Probe Sequence
ttatcagaccaggccgcattgacag

SEQ ID NO: 312758 - DNA, 25 bp, Probe Sequence
ttatcagaccaggccgcattgacag

SEQ ID NO: 312759 - DNA, 25 bp, Probe Sequence
ttatcagcctcatgcctgaatcaaa

SEQ ID NO: 312760 - DNA, 25 bp, Probe Sequence
ttatcaccttagcagaaaaaccaca

SEQ ID NO: 312761 - DNA, 25 bp, Probe Sequence
ttatcttctccacatctgaaattcc

SEQ ID NO: 312762 - DNA, 25 bp, Probe Sequence
ttattttctcaatcttttagcacat

SEQ ID NO: 312763 - DNA, 25 bp, Probe Sequence
ttactgtcactctccctaatgaaat

SEQ ID NO: 312764 - DNA, 25 bp, Probe Sequence
ttacgtcacttatgccaaaaaccca

SEQ ID NO: 312765 - DNA, 25 bp, Probe Sequence
ttaagtagctctttggtaaacacca

SEQ ID NO: 312766 - DNA, 25 bp, Probe Sequence
ttatatctaagtttggttagcctta

SEQ ID NO: 312767 - DNA, 25 bp, Probe Sequence
ttaaccaagcttctattatgccttt

SEQ ID NO: 312768 - DNA, 25 bp, Probe Sequence
ttaggtcaagttcatagtttctgta

SEQ ID NO: 312769 - DNA, 25 bp, Probe Sequence
ttaagttagtctgttgttatagtag

SEQ ID NO: 312770 - DNA, 25 bp, Probe Sequence
ttaaggaggtcgtggtcttgtggag

SEQ ID NO: 312771 - DNA, 25 bp, Probe Sequence
ttaaggaccacgtgtctctggggga

SEQ ID NO: 312772 - DNA, 25 bp, Probe Sequence
ttaaggaccacgtgtctctggggga

SEQ ID NO: 312773 - DNA, 25 bp, Probe Sequence
ttataaaccggtcgcctctggcagc

SEQ ID NO: 312774 - DNA, 25 bp, Probe Sequence
ttctttcctcagaaggtcttggagc

SEQ ID NO: 312775 - DNA, 25 bp, Probe Sequence
ttctttcttaattactcttccaggt

SEQ ID NO: 312776 - DNA, 25 bp, Probe Sequence
ttattttctaaaaagctctccagag

SEQ ID NO: 312777 - DNA, 25 bp, Probe Sequence
ttatgttcttaaggaccccacagag

SEQ ID NO: 312778 - DNA, 25 bp, Probe Sequence
ttatttctctaaaacttccacaaag

SEQ ID NO: 312779 - DNA, 25 bp, Probe Sequence
ttatctttcttgatactttccaaat

SEQ ID NO: 312780 - DNA, 25 bp, Probe Sequence
ttatcttcctggcataatttccatt

SEQ ID NO: 312781 - DNA, 25 bp, Probe Sequence
ttatgtcaccatgggttctggctcc

SEQ ID NO: 312782 - DNA, 25 bp, Probe Sequence
ttatgtcactcaaagctatatggct

SEQ ID NO: 312783 - DNA, 25 bp, Probe Sequence
ttagtcagcttagcatcatgtcgtt

SEQ ID NO: 312784 - DNA, 25 bp, Probe Sequence
ttcagggttagcttcatgtaatttt

SEQ ID NO: 312785 - DNA, 25 bp, Probe Sequence
ttaggagttggcttctgcaaattca

SEQ ID NO: 312786 - DNA, 25 bp, Probe Sequence
ttagcaagtatgccttccatccttg

SEQ ID NO: 312787 - DNA, 25 bp, Probe Sequence
ttaggagtatcctaactgccggtgg

SEQ ID NO: 312788 - DNA, 25 bp, Probe Sequence
ttagtactaccttaggctgggcacg

SEQ ID NO: 312789 - DNA, 25 bp, Probe Sequence
ttagtagctcatccatctagggtgc

SEQ ID NO: 312790 - DNA, 25 bp, Probe Sequence
ttagcatggctctgacgaggcagtg

SEQ ID NO: 312791 - DNA, 25 bp, Probe Sequence
ttcagaggcccgtgaagatatggct

SEQ ID NO: 312792 - DNA, 25 bp, Probe Sequence
ttcaggtgcccagagatcaggtgtc

SEQ ID NO: 312793 - DNA, 25 bp, Probe Sequence
ttcaggtcccagatgatgaagttgg

SEQ ID NO: 312794 - DNA, 25 bp, Probe Sequence
ttagacctcacatattaatgttgag

SEQ ID NO: 312795 - DNA, 25 bp, Probe Sequence
ttctgtgcctactcagtaaaattga

SEQ ID NO: 312796 - DNA, 25 bp, Probe Sequence
ttatctcctgtctacagtttaataa

SEQ ID NO: 312797 - DNA, 25 bp, Probe Sequence
ttatgagcgggatattgattacaaa

SEQ ID NO: 312798 - DNA, 25 bp, Probe Sequence
ttatgacagggtgttgcagtaacaa

SEQ ID NO: 312799 - DNA, 25 bp, Probe Sequence
ttatcccagcctcttagtaaatgaa

SEQ ID NO: 312800 - DNA, 25 bp, Probe Sequence
ttatctcccttgctttgaagatgtt

SEQ ID NO: 312801 - DNA, 25 bp, Probe Sequence
ttatttccttgtatctgtagtcttt

SEQ ID NO: 312802 - DNA, 25 bp, Probe Sequence
ttatttttgttcatctgctgctgtt

SEQ ID NO: 312803 - DNA, 25 bp, Probe Sequence
ttatttttcctcagtgatcttaaaa

SEQ ID NO: 312804 - DNA, 25 bp, Probe Sequence
ttatttttggttttcatcatcatca

SEQ ID NO: 312805 - DNA, 25 bp, Probe Sequence
ttagtattttatcaccagaatcagg

SEQ ID NO: 312806 - DNA, 25 bp, Probe Sequence
ttaccattggtaacccagagtgctg

SEQ ID NO: 312807 - DNA, 25 bp, Probe Sequence
ttcccatcttgcaaactaaggtctg

SEQ ID NO: 312808 - DNA, 25 bp, Probe Sequence
ttatcacttctctaagtaaggttga

SEQ ID NO: 312809 - DNA, 25 bp, Probe Sequence
ttatccttatattttagagctttca

SEQ ID NO: 312810 - DNA, 25 bp, Probe Sequence
ttatcagttatttttgcaaggtaga

SEQ ID NO: 312811 - DNA, 25 bp, Probe Sequence
ttaccttatctgttaaagcgtaaga

SEQ ID NO: 312812 - DNA, 25 bp, Probe Sequence
ttatccattacctcaaagcagtcat

SEQ ID NO: 312813 - DNA, 25 bp, Probe Sequence
ttatcacatatatctaaacatcaga

SEQ ID NO: 312814 - DNA, 25 bp, Probe Sequence
ttatcatgttgatataaatcataat

SEQ ID NO: 312815 - DNA, 25 bp, Probe Sequence
ttatgcatgtacttatccatactaa

SEQ ID NO: 312816 - DNA, 25 bp, Probe Sequence
ttatgtgaatgatctctctgaatcc

SEQ ID NO: 312817 - DNA, 25 bp, Probe Sequence
ttatgtgcttgagtctcttccatct

SEQ ID NO: 312818 - DNA, 25 bp, Probe Sequence
ttatgtgcttgagtctcttccatct

SEQ ID NO: 312819 - DNA, 25 bp, Probe Sequence
ttatgtgcttgagtctcttccatct

SEQ ID NO: 312820 - DNA, 25 bp, Probe Sequence
ttatggattgagtccagcccagctc

SEQ ID NO: 312821 - DNA, 25 bp, Probe Sequence
ttatgtgttgagtccaaagagctgg

SEQ ID NO: 312822 - DNA, 25 bp, Probe Sequence
ttcagtaggatacgagaagctgctg

SEQ ID NO: 312823 - DNA, 25 bp, Probe Sequence
ttagtgagaatgaaagactctattc

SEQ ID NO: 312824 - DNA, 25 bp, Probe Sequence
ttagagaaatgaccgattccagctc

SEQ ID NO: 312825 - DNA, 25 bp, Probe Sequence
ttagcaaaatgttggaatccctgtt

SEQ ID NO: 312826 - DNA, 25 bp, Probe Sequence
ttacttcaatttgaacccatttgag

SEQ ID NO: 312827 - DNA, 25 bp, Probe Sequence
ttatctgttttacaagtccattgat

SEQ ID NO: 312828 - DNA, 25 bp, Probe Sequence
ttatcttttctacagcaaatttata

SEQ ID NO: 312829 - DNA, 25 bp, Probe Sequence
ttatattttctacatctaattttag

SEQ ID NO: 312830 - DNA, 25 bp, Probe Sequence
ttaattttccaacataatggattaa

SEQ ID NO: 312831 - DNA, 25 bp, Probe Sequence
ttacccgtaacacatttgtgattaa

SEQ ID NO: 312832 - DNA, 25 bp, Probe Sequence
ttaggggtaaacaatatctctggta

SEQ ID NO: 312833 - DNA, 25 bp, Probe Sequence
ttaggggtaaacaatatctctggta

SEQ ID NO: 312834 - DNA, 25 bp, Probe Sequence
ttagggagtgatatttaccttgatg

SEQ ID NO: 312835 - DNA, 25 bp, Probe Sequence
ttagtaggtgagttttcacctcgaa

SEQ ID NO: 312836 - DNA, 25 bp, Probe Sequence
ttaccagtctgggaattccccgaag

SEQ ID NO: 312837 - DNA, 25 bp, Probe Sequence
ttacctgagcaagaattccctggat

SEQ ID NO: 312838 - DNA, 25 bp, Probe Sequence
ttcaccgaattcgaatcaccctaac

SEQ ID NO: 312839 - DNA, 25 bp, Probe Sequence
ttatgcgaaattcaacatggccaac

SEQ ID NO: 312840 - DNA, 25 bp, Probe Sequence
ttatcactacctcaactgaggaaga

SEQ ID NO: 312841 - DNA, 25 bp, Probe Sequence
ttatcccaccctcgaggcagggaaa

SEQ ID NO: 312842 - DNA, 25 bp, Probe Sequence
ttatcccaccctcgaggcagggaaa

SEQ ID NO: 312843 - DNA, 25 bp, Probe Sequence
ttatcccaccctcgaggcagggaaa

SEQ ID NO: 312844 - DNA, 25 bp, Probe Sequence
ttatcctagaacttgaggctgggcg

SEQ ID NO: 312845 - DNA, 25 bp, Probe Sequence
ttatctctgagaagctaggccgtgg

SEQ ID NO: 312846 - DNA, 25 bp, Probe Sequence
ttatctgcagtaatctgggcttctt

SEQ ID NO: 312847 - DNA, 25 bp, Probe Sequence
ttatctcgtgataagtgggactttc

SEQ ID NO: 312848 - DNA, 25 bp, Probe Sequence
ttatcatctatgttcggctggactt

SEQ ID NO: 312849 - DNA, 25 bp, Probe Sequence
ttatggctcattgcagcctcgactt

SEQ ID NO: 312850 - DNA, 25 bp, Probe Sequence
ttagagcaatctgaccctggcattg

SEQ ID NO: 312851 - DNA, 25 bp, Probe Sequence
ttatcagagcatgtcacccttttgc

SEQ ID NO: 312852 - DNA, 25 bp, Probe Sequence
ttatcgagatagtcactcccacgtc

SEQ ID NO: 312853 - DNA, 25 bp, Probe Sequence
ttatcaggaacgcctcgatacgctg

SEQ ID NO: 312854 - DNA, 25 bp, Probe Sequence
ttatcaaaaccttcagtatctcatg

SEQ ID NO: 312855 - DNA, 25 bp, Probe Sequence
ttagaaacctcattggccagctcat

SEQ ID NO: 312856 - DNA, 25 bp, Probe Sequence
ttaaaaccccagccaactcattggg

SEQ ID NO: 312857 - DNA, 25 bp, Probe Sequence
ttaaaaccctagacatttaatgtct

SEQ ID NO: 312858 - DNA, 25 bp, Probe Sequence
ttagtaactgcacactatttccctc

SEQ ID NO: 312859 - DNA, 25 bp, Probe Sequence
ttagtaatgtccttattttccctct

SEQ ID NO: 312860 - DNA, 25 bp, Probe Sequence
ttaattagtgccagatgtattccat

SEQ ID NO: 312861 - DNA, 25 bp, Probe Sequence
ttcgcttaggccagagtgatggcac

SEQ ID NO: 312862 - DNA, 25 bp, Probe Sequence
ttaggtaggtatggttgcaggcacc

SEQ ID NO: 312863 - DNA, 25 bp, Probe Sequence
ttaagaatgaatatgtggccgaccc

SEQ ID NO: 312864 - DNA, 25 bp, Probe Sequence
ttatgagaaacatttggtgcccaga

SEQ ID NO: 312865 - DNA, 25 bp, Probe Sequence
ttaggaatgtcttcttgtcagccag

SEQ ID NO: 312866 - DNA, 25 bp, Probe Sequence
ttagtagagtcttttatataggcaa

SEQ ID NO: 312867 - DNA, 25 bp, Probe Sequence
ttcgtcaagtccgttatccagaccc

SEQ ID NO: 312868 - DNA, 25 bp, Probe Sequence
ttctacaatgagctgcgtgtggctc

SEQ ID NO: 312869 - DNA, 25 bp, Probe Sequence
ttataagctgcggctggggcgctac

SEQ ID NO: 312870 - DNA, 25 bp, Probe Sequence
ttataaggcctggtgcgatggctca

SEQ ID NO: 312871 - DNA, 25 bp, Probe Sequence
ttatgaaactcgctgctagctgcca

SEQ ID NO: 312872 - DNA, 25 bp, Probe Sequence
ttatgtagccaccgttagctgtgaa

SEQ ID NO: 312873 - DNA, 25 bp, Probe Sequence
ttatctggccctcattaatgctgtc

SEQ ID NO: 312874 - DNA, 25 bp, Probe Sequence
ttaggagcactccagttcaactgtt

SEQ ID NO: 312875 - DNA, 25 bp, Probe Sequence
ttagaagcatcccaactcttctctt

SEQ ID NO: 312876 - DNA, 25 bp, Probe Sequence
ttagtggtcccaacttgttcttgat

SEQ ID NO: 312877 - DNA, 25 bp, Probe Sequence
ttaggagttgcctttatgtttatgt

SEQ ID NO: 312878 - DNA, 25 bp, Probe Sequence
ttacgtgggcattgtctttttagat

SEQ ID NO: 312879 - DNA, 25 bp, Probe Sequence
ttatgcctgggcaactattttttgt

SEQ ID NO: 312880 - DNA, 25 bp, Probe Sequence
ttatgctcgtgccttgtatttgttt

SEQ ID NO: 312881 - DNA, 25 bp, Probe Sequence
ttatctcttgctctaaatgatatgt

SEQ ID NO: 312882 - DNA, 25 bp, Probe Sequence
ttatctcatattggtggaaatttcc

SEQ ID NO: 312883 - DNA, 25 bp, Probe Sequence
ttatctgctattcgggtaatcttca

SEQ ID NO: 312884 - DNA, 25 bp, Probe Sequence
ttaccagatcatcagtttagcttca

SEQ ID NO: 312885 - DNA, 25 bp, Probe Sequence
ttatcaatgattcatgtttccctca

SEQ ID NO: 312886 - DNA, 25 bp, Probe Sequence
ttatcaccattcttatgtcacttta

SEQ ID NO: 312887 - DNA, 25 bp, Probe Sequence
ttatcccatcgctttgattattgtt

SEQ ID NO: 312888 - DNA, 25 bp, Probe Sequence
ttatccctctgttttatattttctc

SEQ ID NO: 312889 - DNA, 25 bp, Probe Sequence
ttatccctgcttatctgaaacttcc

SEQ ID NO: 312890 - DNA, 25 bp, Probe Sequence
ttaccccgatcacagaaaccatacc

SEQ ID NO: 312891 - DNA, 25 bp, Probe Sequence
ttcacaggggtacagaaattatccc

SEQ ID NO: 312892 - DNA, 25 bp, Probe Sequence
ttcacaatgtcgtgctaaataaatg

SEQ ID NO: 312893 - DNA, 25 bp, Probe Sequence
ttatctcttcgctgctgaaataata

SEQ ID NO: 312894 - DNA, 25 bp, Probe Sequence
ttatgtcatccctcttattaatcat

SEQ ID NO: 312895 - DNA, 25 bp, Probe Sequence
ttatgaacacccatttcctgacttt

SEQ ID NO: 312896 - DNA, 25 bp, Probe Sequence
ttatagaaagtcatttctcaaaatt

SEQ ID NO: 312897 - DNA, 25 bp, Probe Sequence
ttatgaaagcagtttttctcctaag

SEQ ID NO: 312898 - DNA, 25 bp, Probe Sequence
ttataataggttgcttctctctcag

SEQ ID NO: 312899 - DNA, 25 bp, Probe Sequence
ttataaagatctggcctgttcctgc

SEQ ID NO: 312900 - DNA, 25 bp, Probe Sequence
ttagagaagcattccgtgtgtttga

SEQ ID NO: 312901 - DNA, 25 bp, Probe Sequence
ttatgatattgccctctttgtattc

SEQ ID NO: 312902 - DNA, 25 bp, Probe Sequence
ttatgtgttcgatcatgtatgagat

SEQ ID NO: 312903 - DNA, 25 bp, Probe Sequence
ttatgttccagattgaccatgaata

SEQ ID NO: 312904 - DNA, 25 bp, Probe Sequence
ttatcttgtcaattatgccaaataa

SEQ ID NO: 312905 - DNA, 25 bp, Probe Sequence
ttagtttcaagtaccttatgagggc

SEQ ID NO: 312906 - DNA, 25 bp, Probe Sequence
ttatcttgtacggtcactgttggtg

SEQ ID NO: 312907 - DNA, 25 bp, Probe Sequence
ttatgtgatcttgggatacttattt

SEQ ID NO: 312908 - DNA, 25 bp, Probe Sequence
ttatggtttctgccagattctatgt

SEQ ID NO: 312909 - DNA, 25 bp, Probe Sequence
ttaggatgatacccattgtctatgt

SEQ ID NO: 312910 - DNA, 25 bp, Probe Sequence
ttaggtatcaccactgtaatctcca

SEQ ID NO: 312911 - DNA, 25 bp, Probe Sequence
ttagagttcttccctggaatccagc

SEQ ID NO: 312912 - DNA, 25 bp, Probe Sequence
ttagaggctttgctgggacataaca

SEQ ID NO: 312913 - DNA, 25 bp, Probe Sequence
ttagatccatttctgcagaacttac

SEQ ID NO: 312914 - DNA, 25 bp, Probe Sequence
ttagctaacttagtgcaaacataac

SEQ ID NO: 312915 - DNA, 25 bp, Probe Sequence
ttatgcttattttctgtcaacacta

SEQ ID NO: 312916 - DNA, 25 bp, Probe Sequence
ttatcttgcccattttaatacaaat

SEQ ID NO: 312917 - DNA, 25 bp, Probe Sequence
ttactgtagcactttttacactgaa

SEQ ID NO: 312918 - DNA, 25 bp, Probe Sequence
ttagctgaagaattgtattacattt

SEQ ID NO: 312919 - DNA, 25 bp, Probe Sequence
ttaggatatagttgaatttctttaa

SEQ ID NO: 312920 - DNA, 25 bp, Probe Sequence
ttaggtatcgtattttatcagctta

SEQ ID NO: 312921 - DNA, 25 bp, Probe Sequence
ttaggaattgtatttgttgcctttt

SEQ ID NO: 312922 - DNA, 25 bp, Probe Sequence
ttatgtggactgtaaatgttttatt

SEQ ID NO: 312923 - DNA, 25 bp, Probe Sequence
ttatgtgtgctttaagggctgtgtt

SEQ ID NO: 312924 - DNA, 25 bp, Probe Sequence
ttatgctttcattacctggttggtt

SEQ ID NO: 312925 - DNA, 25 bp, Probe Sequence
ttatgtttatgttcactgcctttca

SEQ ID NO: 312926 - DNA, 25 bp, Probe Sequence
ttatgttgttattctcggactgtga

SEQ ID NO: 312927 - DNA, 25 bp, Probe Sequence
ttatgggattctacctgtacgctca

SEQ ID NO: 312928 - DNA, 25 bp, Probe Sequence
ttatggttccccaagatacgctgaa

SEQ ID NO: 312929 - DNA, 25 bp, Probe Sequence
ttatgttctcccatatatagggaaa

SEQ ID NO: 312930 - DNA, 25 bp, Probe Sequence
ttagtttctcctctaatcagtaatt

SEQ ID NO: 312931 - DNA, 25 bp, Probe Sequence
ttagtttctcttaatcaaaattact

SEQ ID NO: 312932 - DNA, 25 bp, Probe Sequence
ttaggtgacactatagaacaagttt

SEQ ID NO: 312933 - DNA, 25 bp, Probe Sequence
ttatggtgacacctatatgaacaca

SEQ ID NO: 312934 - DNA, 25 bp, Probe Sequence
ttaggcatgaaacaggacaacacaa

SEQ ID NO: 312935 - DNA, 25 bp, Probe Sequence
ttatgactagtacaccaaagcaatg

SEQ ID NO: 312936 - DNA, 25 bp, Probe Sequence
ttatgattactatatccgaggagca

SEQ ID NO: 312937 - DNA, 25 bp, Probe Sequence
ttagcttagcgtgtcagcgggcgcc

SEQ ID NO: 312938 - DNA, 25 bp, Probe Sequence
ttagcctagcgtggtggctggcggg

SEQ ID NO: 312939 - DNA, 25 bp, Probe Sequence
ttagcctcagacactactgaggtgg

SEQ ID NO: 312940 - DNA, 25 bp, Probe Sequence
ttagtctgcagtctccgagacgggg

SEQ ID NO: 312941 - DNA, 25 bp, Probe Sequence
ttactctgcagtttcctggaagttg

SEQ ID NO: 312942 - DNA, 25 bp, Probe Sequence
ttagccgatgactttctggacttct

SEQ ID NO: 312943 - DNA, 25 bp, Probe Sequence
ttaccgaagcgaacgcagcctttga

SEQ ID NO: 312944 - DNA, 25 bp, Probe Sequence
ttacccaaacaccgcgtgattggaa

SEQ ID NO: 312945 - DNA, 25 bp, Probe Sequence
ttacccaaactgtccattactggaa

SEQ ID NO: 312946 - DNA, 25 bp, Probe Sequence
ttatcccaattttacagatcaagga

SEQ ID NO: 312947 - DNA, 25 bp, Probe Sequence
ttatgctctatgatctgaacaaaag

SEQ ID NO: 312948 - DNA, 25 bp, Probe Sequence
ttatcctcatgcattccacataatt

SEQ ID NO: 312949 - DNA, 25 bp, Probe Sequence
ttaccacagcacagaacatacattc

SEQ ID NO: 312950 - DNA, 25 bp, Probe Sequence
ttacatacctgctgcaccaaattca

SEQ ID NO: 312951 - DNA, 25 bp, Probe Sequence
ttaataattcatgccaaaaatagaa

SEQ ID NO: 312952 - DNA, 25 bp, Probe Sequence
ttagatactccaactcaccaaaatg

SEQ ID NO: 312953 - DNA, 25 bp, Probe Sequence
ttaatacttcgattctgtaaagagt

SEQ ID NO: 312954 - DNA, 25 bp, Probe Sequence
ttatgaccctcgatctctatatgaa

SEQ ID NO: 312955 - DNA, 25 bp, Probe Sequence
ttagcactaccgatgctgaaagaca

SEQ ID NO: 312956 - DNA, 25 bp, Probe Sequence
ttagactcacacgctgtggaataag

SEQ ID NO: 312957 - DNA, 25 bp, Probe Sequence
ttagagctccaattgctgttttaca

SEQ ID NO: 312958 - DNA, 25 bp, Probe Sequence
ttagtctcacagtttgcttgtctat

SEQ ID NO: 312959 - DNA, 25 bp, Probe Sequence
ttatcctcacaaattggtgttctaa

SEQ ID NO: 312960 - DNA, 25 bp, Probe Sequence
ttatctcatccttcttttgtttaca

SEQ ID NO: 312961 - DNA, 25 bp, Probe Sequence
ttacccccttctaatgtttgcataa

SEQ ID NO: 312962 - DNA, 25 bp, Probe Sequence
ttagcacccatcattaatttatgtc

SEQ ID NO: 312963 - DNA, 25 bp, Probe Sequence
ttagcccctggtaaccattattcta

SEQ ID NO: 312964 - DNA, 25 bp, Probe Sequence
ttacttacttctacagccattttgc

SEQ ID NO: 312965 - DNA, 25 bp, Probe Sequence
ttagctgtactataagtagttggtt

SEQ ID NO: 312966 - DNA, 25 bp, Probe Sequence
ttagcttttagtaactacttggttg

SEQ ID NO: 312967 - DNA, 25 bp, Probe Sequence
ttacttttagttctataagtgagga

SEQ ID NO: 312968 - DNA, 25 bp, Probe Sequence
ttacttccggtttcttcatattgag

SEQ ID NO: 312969 - DNA, 25 bp, Probe Sequence
ttacttgccggaggtgctacagggg

SEQ ID NO: 312970 - DNA, 25 bp, Probe Sequence
ttgacttccgtgtggcaccggatgt

SEQ ID NO: 312971 - DNA, 25 bp, Probe Sequence
ttacgcccgagatgaaacagaattc

SEQ ID NO: 312972 - DNA, 25 bp, Probe Sequence
ttacgcccgagatgaaacagaattc

SEQ ID NO: 312973 - DNA, 25 bp, Probe Sequence
ttacggccaccaaaaaagacatgtc

SEQ ID NO: 312974 - DNA, 25 bp, Probe Sequence
ttaccagccactaaaaaatactgta

SEQ ID NO: 312975 - DNA, 25 bp, Probe Sequence
ttaccagccactttgcaaaaactgt

SEQ ID NO: 312976 - DNA, 25 bp, Probe Sequence
ttaccagcctgtgtaaccagtcctt

SEQ ID NO: 312977 - DNA, 25 bp, Probe Sequence
ttaccattttcgagaccagatcctg

SEQ ID NO: 312978 - DNA, 25 bp, Probe Sequence
ttacagcttccttgtaaccacagcc

SEQ ID NO: 312979 - DNA, 25 bp, Probe Sequence
ttagcagcttccagattgacgacaa

SEQ ID NO: 312980 - DNA, 25 bp, Probe Sequence
ttatccattcccaagatgcctgatc

SEQ ID NO: 312981 - DNA, 25 bp, Probe Sequence
ttatcatgaatccctagagctgcta

SEQ ID NO: 312982 - DNA, 25 bp, Probe Sequence
ttagcatcagtcaacccctgctaat

SEQ ID NO: 312983 - DNA, 25 bp, Probe Sequence
ttagatgagcataagtcctctccaa

SEQ ID NO: 312984 - DNA, 25 bp, Probe Sequence
ttaatgagtctaattcctcccactt

SEQ ID NO: 312985 - DNA, 25 bp, Probe Sequence
ttctacagttttttccgcagacttc

SEQ ID NO: 312986 - DNA, 25 bp, Probe Sequence
ttggctagtttttcccgaatttctg

SEQ ID NO: 312987 - DNA, 25 bp, Probe Sequence
ttaggagtaaattcccgaagtcctg

SEQ ID NO: 312988 - DNA, 25 bp, Probe Sequence
ttaggcagattacaccacggattcc

SEQ ID NO: 312989 - DNA, 25 bp, Probe Sequence
ttaggcactgctttatccaggggct

SEQ ID NO: 312990 - DNA, 25 bp, Probe Sequence
ttagatcactgcagcttctaggacc

SEQ ID NO: 312991 - DNA, 25 bp, Probe Sequence
ttagtctcactgccgttaagattca

SEQ ID NO: 312992 - DNA, 25 bp, Probe Sequence
ttagtgctacttctttcagctgtcc

SEQ ID NO: 312993 - DNA, 25 bp, Probe Sequence
ttatgttacatttatttcaccagaa

SEQ ID NO: 312994 - DNA, 25 bp, Probe Sequence
ttagtatgacctacaatctcccgac

SEQ ID NO: 312995 - DNA, 25 bp, Probe Sequence
ttagttgaatgctcaattccttaca

SEQ ID NO: 312996 - DNA, 25 bp, Probe Sequence
ttagatggacagttactccctgata

SEQ ID NO: 312997 - DNA, 25 bp, Probe Sequence
ttaatggagcggggcgccagtgaat

SEQ ID NO: 312998 - DNA, 25 bp, Probe Sequence
ttaagggcaggggcgtctaatatcc

SEQ ID NO: 312999 - DNA, 25 bp, Probe Sequence
ttaaggattgtgtgttctaaatcat

SEQ ID NO: 313000 - DNA, 25 bp, Probe Sequence
ttaatgactaatatgtttacaagtt

SEQ ID NO: 313001 - DNA, 25 bp, Probe Sequence
ttaatactaattgcttttagaggca

SEQ ID NO: 313002 - DNA, 25 bp, Probe Sequence
ttaataaactggtgttctggttcat

SEQ ID NO: 313003 - DNA, 25 bp, Probe Sequence
ttcaaaacagggtgctcctcctggc

SEQ ID NO: 313004 - DNA, 25 bp, Probe Sequence
ttcagaagacgagaaccctgcctgg

SEQ ID NO: 313005 - DNA, 25 bp, Probe Sequence
ttagacaactggtaagccagctcct

SEQ ID NO: 313006 - DNA, 25 bp, Probe Sequence
ttagacattccgttatgcatcgccg

SEQ ID NO: 313007 - DNA, 25 bp, Probe Sequence
ttaggcatctgccctgatgatgctg

SEQ ID NO: 313008 - DNA, 25 bp, Probe Sequence
ttatccatctgcctcagacagtgtt

SEQ ID NO: 313009 - DNA, 25 bp, Probe Sequence
ttatcctctgattctagcactttca

SEQ ID NO: 313010 - DNA, 25 bp, Probe Sequence
ttagctcttgcatcaagatctttaa

SEQ ID NO: 313011 - DNA, 25 bp, Probe Sequence
ttagttcttcacctgctatcattta

SEQ ID NO: 313012 - DNA, 25 bp, Probe Sequence
ttcagttcttacacattccatctta

SEQ ID NO: 313013 - DNA, 25 bp, Probe Sequence
ttatgattcataccttattccctat

SEQ ID NO: 313014 - DNA, 25 bp, Probe Sequence
ttatgttcatagtacttttcctctt

SEQ ID NO: 313015 - DNA, 25 bp, Probe Sequence
ttagtattagcatatttaacatttc

SEQ ID NO: 313016 - DNA, 25 bp, Probe Sequence
ttagctcactttcatttaatccatt

SEQ ID NO: 313017 - DNA, 25 bp, Probe Sequence
ttagccactggacacctagttttca

SEQ ID NO: 313018 - DNA, 25 bp, Probe Sequence
ttcgccactagaaacccaggtttat

SEQ ID NO: 313019 - DNA, 25 bp, Probe Sequence
ttcccactaaagtcagtccattttc

SEQ ID NO: 313020 - DNA, 25 bp, Probe Sequence
ttaccactaataccagtaaaattat

SEQ ID NO: 313021 - DNA, 25 bp, Probe Sequence
ttaccagtaatctcaaaagaatcac

SEQ ID NO: 313022 - DNA, 25 bp, Probe Sequence
ttatgccaaacctgcaaacaaacag

SEQ ID NO: 313023 - DNA, 25 bp, Probe Sequence
ttatccagagggagccaaacaaagc

SEQ ID NO: 313024 - DNA, 25 bp, Probe Sequence
ttaccaacgcagatgcccagaaaac

SEQ ID NO: 313025 - DNA, 25 bp, Probe Sequence
ttatccaggggcttcacccatgaaa

SEQ ID NO: 313026 - DNA, 25 bp, Probe Sequence
ttcatgaagggcgcgacccgcgaat

SEQ ID NO: 313027 - DNA, 25 bp, Probe Sequence
ttatgaaggcagcacagtccccgaa

SEQ ID NO: 313028 - DNA, 25 bp, Probe Sequence
ttatgaaggcagcacatgccccaaa

SEQ ID NO: 313029 - DNA, 25 bp, Probe Sequence
ttatgccttgcaaagcaccctcaaa

SEQ ID NO: 313030 - DNA, 25 bp, Probe Sequence
ttagtgcaaatcagcacgcctaaat

SEQ ID NO: 313031 - DNA, 25 bp, Probe Sequence
ttagaataactgccaccaccagaca

SEQ ID NO: 313032 - DNA, 25 bp, Probe Sequence
ttagaagacactggcatcccaaggc

SEQ ID NO: 313033 - DNA, 25 bp, Probe Sequence
ttaccagactcttgggccagtgggc

SEQ ID NO: 313034 - DNA, 25 bp, Probe Sequence
ttaccagaacagtgagagtggggaa

SEQ ID NO: 313035 - DNA, 25 bp, Probe Sequence
ttaccaaggcagtgaaggagagtac

SEQ ID NO: 313036 - DNA, 25 bp, Probe Sequence
ttagccaaaggcttacagagagctt

SEQ ID NO: 313037 - DNA, 25 bp, Probe Sequence
ttaccagcacttctacgatggctct

SEQ ID NO: 313038 - DNA, 25 bp, Probe Sequence
ttaccacactggcatatcagatgaa

SEQ ID NO: 313039 - DNA, 25 bp, Probe Sequence
ttacccagtgggacagaggagcaag

SEQ ID NO: 313040 - DNA, 25 bp, Probe Sequence
ttatccttgtgggtcagatttcaga

SEQ ID NO: 313041 - DNA, 25 bp, Probe Sequence
ttatccttgtatctctgcagtgtgg

SEQ ID NO: 313042 - DNA, 25 bp, Probe Sequence
ttagcacttgtataatcagactgga

SEQ ID NO: 313043 - DNA, 25 bp, Probe Sequence
ttacctgtagtttatagatatgagc

SEQ ID NO: 313044 - DNA, 25 bp, Probe Sequence
ttagttaacttattcaattgagacc

SEQ ID NO: 313045 - DNA, 25 bp, Probe Sequence
ttagttatttatcttattgagaggt

SEQ ID NO: 313046 - DNA, 25 bp, Probe Sequence
ttagttcttttctttgatctgtgtg

SEQ ID NO: 313047 - DNA, 25 bp, Probe Sequence
ttagtagtttattctgcgccttttg

SEQ ID NO: 313048 - DNA, 25 bp, Probe Sequence
ttagttttataagcttctccctggt

SEQ ID NO: 313049 - DNA, 25 bp, Probe Sequence
ttaaccaaagaagctgtactccggg

SEQ ID NO: 313050 - DNA, 25 bp, Probe Sequence
ttagaccattagacaattgacactg

SEQ ID NO: 313051 - DNA, 25 bp, Probe Sequence
ttagacctctcaacacagtatgcca

SEQ ID NO: 313052 - DNA, 25 bp, Probe Sequence
ttagacaactcttcaggttccacat

SEQ ID NO: 313053 - DNA, 25 bp, Probe Sequence
ttagaaacttcatatgtgtcatcac

SEQ ID NO: 313054 - DNA, 25 bp, Probe Sequence
ttaggcatagcttccagttcttcct

SEQ ID NO: 313055 - DNA, 25 bp, Probe Sequence
ttagagctagctgacctttggccaa

SEQ ID NO: 313056 - DNA, 25 bp, Probe Sequence
ttaactcaggtgccacttagtccag

SEQ ID NO: 313057 - DNA, 25 bp, Probe Sequence
ttacccagagtttttatgtagcagg

SEQ ID NO: 313058 - DNA, 25 bp, Probe Sequence
ttccctagagggttcctgtagacct

SEQ ID NO: 313059 - DNA, 25 bp, Probe Sequence
ttccctagggtgtttctggcagggc

SEQ ID NO: 313060 - DNA, 25 bp, Probe Sequence
ttacccagggtttttggagtctctg

SEQ ID NO: 313061 - DNA, 25 bp, Probe Sequence
ttacccatggaaatgtttgacgttt

SEQ ID NO: 313062 - DNA, 25 bp, Probe Sequence
ttcagaacaggaaggacattgtcgt

SEQ ID NO: 313063 - DNA, 25 bp, Probe Sequence
ttagaacgaattggagcttgagctt

SEQ ID NO: 313064 - DNA, 25 bp, Probe Sequence
ttaccatctgactgaggttactctg

SEQ ID NO: 313065 - DNA, 25 bp, Probe Sequence
ttgaatactatcttgggtttaccgt

SEQ ID NO: 313066 - DNA, 25 bp, Probe Sequence
ttgaatactatcttgggtttaccgt

SEQ ID NO: 313067 - DNA, 25 bp, Probe Sequence
ttgaatactatcttgggtttaccgt

SEQ ID NO: 313068 - DNA, 25 bp, Probe Sequence
ttactacttttgagattgccccaat

SEQ ID NO: 313069 - DNA, 25 bp, Probe Sequence
ttcagtcttttgtttaaccctcaat

SEQ ID NO: 313070 - DNA, 25 bp, Probe Sequence
ttactcttttttataccctctatat

SEQ ID NO: 313071 - DNA, 25 bp, Probe Sequence
ttaccttttggtttacaaatctatg

SEQ ID NO: 313072 - DNA, 25 bp, Probe Sequence
ttatccttttaccaaatcaatatta

SEQ ID NO: 313073 - DNA, 25 bp, Probe Sequence
ttaacttcctccatacataagcttc

SEQ ID NO: 313074 - DNA, 25 bp, Probe Sequence
ttacattttagcttataataacttc

SEQ ID NO: 313075 - DNA, 25 bp, Probe Sequence
ttactgatttgaccttacctactat

SEQ ID NO: 313076 - DNA, 25 bp, Probe Sequence
ttaggtgtggtactgaccctactct

SEQ ID NO: 313077 - DNA, 25 bp, Probe Sequence
ttacagtggtggctgacaccccttg

SEQ ID NO: 313078 - DNA, 25 bp, Probe Sequence
ttcacgctggggctagcaggacttc

SEQ ID NO: 313079 - DNA, 25 bp, Probe Sequence
ttacgggctgggtgcagtggttcac

SEQ ID NO: 313080 - DNA, 25 bp, Probe Sequence
ttaggggcgcagcgtcaggtgttca

SEQ ID NO: 313081 - DNA, 25 bp, Probe Sequence
ttatgagggccacgggtctgtgttc

SEQ ID NO: 313082 - DNA, 25 bp, Probe Sequence
ttatgaggaggttggtgtggattct

SEQ ID NO: 313083 - DNA, 25 bp, Probe Sequence
ttctaagagtctggtgtgctggccc

SEQ ID NO: 313084 - DNA, 25 bp, Probe Sequence
ttaaagcagtcttgcaggtcgctcc

SEQ ID NO: 313085 - DNA, 25 bp, Probe Sequence
ttagctcagttctagcaggtggcac

SEQ ID NO: 313086 - DNA, 25 bp, Probe Sequence
ttagccagttcaaagtgtatattta

SEQ ID NO: 313087 - DNA, 25 bp, Probe Sequence
ttagccaggtgaacctgagcatgct

SEQ ID NO: 313088 - DNA, 25 bp, Probe Sequence
ttagttgctagaagtcatgagtctt

SEQ ID NO: 313089 - DNA, 25 bp, Probe Sequence
ttagattccatatgattcactcatt

SEQ ID NO: 313090 - DNA, 25 bp, Probe Sequence
ttagatgtcccaacttcagctgttg

SEQ ID NO: 313091 - DNA, 25 bp, Probe Sequence
ttagtatcgcctattaccattgtga

SEQ ID NO: 313092 - DNA, 25 bp, Probe Sequence
ttagtcgtcgctatgtacctggtga

SEQ ID NO: 313093 - DNA, 25 bp, Probe Sequence
ttagtcctcagaaatggactaggaa

SEQ ID NO: 313094 - DNA, 25 bp, Probe Sequence
ttagtcagctgcccaagaactagta

SEQ ID NO: 313095 - DNA, 25 bp, Probe Sequence
ttagtcatccgctattaccatggta

SEQ ID NO: 313096 - DNA, 25 bp, Probe Sequence
ttagtcatctgctagttaccatggt

SEQ ID NO: 313097 - DNA, 25 bp, Probe Sequence
ttagtcatcgctattaccatgtgat

SEQ ID NO: 313098 - DNA, 25 bp, Probe Sequence
ttagtcatcgctattaccatgtgat

SEQ ID NO: 313099 - DNA, 25 bp, Probe Sequence
ttagtcatcgctataccatggtgat

SEQ ID NO: 313100 - DNA, 25 bp, Probe Sequence
ttagtcatcgctataccatggtgat

SEQ ID NO: 313101 - DNA, 25 bp, Probe Sequence
ttagtactctgcatgccacaagtga

SEQ ID NO: 313102 - DNA, 25 bp, Probe Sequence
ttatgtcctctgtcgggacatggat

SEQ ID NO: 313103 - DNA, 25 bp, Probe Sequence
ttatgctctgccgctgggaagagaa

SEQ ID NO: 313104 - DNA, 25 bp, Probe Sequence
ttagttgccatgttggaggaagaag

SEQ ID NO: 313105 - DNA, 25 bp, Probe Sequence
ttaatctgccaagggccgactaaga

SEQ ID NO: 313106 - DNA, 25 bp, Probe Sequence
ttaatgtgccaaggagccgttttct

SEQ ID NO: 313107 - DNA, 25 bp, Probe Sequence
ttcacttctaagggccctgttttga

SEQ ID NO: 313108 - DNA, 25 bp, Probe Sequence
ttacgttaactggcccacttgggca

SEQ ID NO: 313109 - DNA, 25 bp, Probe Sequence
ttaagtaatttccccactctgagtg

SEQ ID NO: 313110 - DNA, 25 bp, Probe Sequence
ttgaagtcacatagctgggccacct

SEQ ID NO: 313111 - DNA, 25 bp, Probe Sequence
ttagaggacaatggcgttcagccac

SEQ ID NO: 313112 - DNA, 25 bp, Probe Sequence
ttagaccagatgaagactccagcca

SEQ ID NO: 313113 - DNA, 25 bp, Probe Sequence
ttaccctaataaagccaccacttgg

SEQ ID NO: 313114 - DNA, 25 bp, Probe Sequence
ttacggtaaaactgcgccacttggc

SEQ ID NO: 313115 - DNA, 25 bp, Probe Sequence
ttacctgtgcaacaaatctgccctt

SEQ ID NO: 313116 - DNA, 25 bp, Probe Sequence
ttacttggtatgcaactatgcccca

SEQ ID NO: 313117 - DNA, 25 bp, Probe Sequence
ttactgtggcttgtagcattcctcc

SEQ ID NO: 313118 - DNA, 25 bp, Probe Sequence
ttagttgacctcttagttgcctcaa

SEQ ID NO: 313119 - DNA, 25 bp, Probe Sequence
ttagacgacctgtccagatggttac

SEQ ID NO: 313120 - DNA, 25 bp, Probe Sequence
ttagcacccctggccaaggtcatcc

SEQ ID NO: 313121 - DNA, 25 bp, Probe Sequence
ttagcacccctggccaaggtcatcc

SEQ ID NO: 313122 - DNA, 25 bp, Probe Sequence
ttagcagaccctggtgcagtggctt

SEQ ID NO: 313123 - DNA, 25 bp, Probe Sequence
ttacaatggcttctgcatgcatggg

SEQ ID NO: 313124 - DNA, 25 bp, Probe Sequence
ttacctcgttgcactgctgagagca

SEQ ID NO: 313125 - DNA, 25 bp, Probe Sequence
ttaccatctgtttcttctgtgtgag

SEQ ID NO: 313126 - DNA, 25 bp, Probe Sequence
ttccccttttctggggagcaccgca

SEQ ID NO: 313127 - DNA, 25 bp, Probe Sequence
ttacccgttgttaggggcgcagcgt

SEQ ID NO: 313128 - DNA, 25 bp, Probe Sequence
ttacccagttttaaagcccatcatg

SEQ ID NO: 313129 - DNA, 25 bp, Probe Sequence
ttacccattttctttaatcttcaat

SEQ ID NO: 313130 - DNA, 25 bp, Probe Sequence
ttatgacgactttatttattctaat

SEQ ID NO: 313131 - DNA, 25 bp, Probe Sequence
ttatgagcttctacaggtattttta

SEQ ID NO: 313132 - DNA, 25 bp, Probe Sequence
ttatgccagttgagctgaatctttt

SEQ ID NO: 313133 - DNA, 25 bp, Probe Sequence
ttagcacagtatcagtaccatttat

SEQ ID NO: 313134 - DNA, 25 bp, Probe Sequence
ttacatggcaatcaaagccttttga

SEQ ID NO: 313135 - DNA, 25 bp, Probe Sequence
ttaatgtgaaataaaccctgtttgc

SEQ ID NO: 313136 - DNA, 25 bp, Probe Sequence
ttaagaaaatccaccctttatcaca

SEQ ID NO: 313137 - DNA, 25 bp, Probe Sequence
ttaaacaacagctcccctgtattcc

SEQ ID NO: 313138 - DNA, 25 bp, Probe Sequence
ttagatactaaatcgtcccttctcc

SEQ ID NO: 313139 - DNA, 25 bp, Probe Sequence
ttaaaaacacaatgtccctaccgtg

SEQ ID NO: 313140 - DNA, 25 bp, Probe Sequence
ttaaaatacgaatgttaccaggcat

SEQ ID NO: 313141 - DNA, 25 bp, Probe Sequence
ttaaaagttcaattctaggccagga

SEQ ID NO: 313142 - DNA, 25 bp, Probe Sequence
ttcaggaggttcagggaggccagtg

SEQ ID NO: 313143 - DNA, 25 bp, Probe Sequence
ttaggggactgcatgggaagcacgg

SEQ ID NO: 313144 - DNA, 25 bp, Probe Sequence
ttaggtggcagggagcgcggcagcc

SEQ ID NO: 313145 - DNA, 25 bp, Probe Sequence
ttaggcatgtgcaagtcccaggcct

SEQ ID NO: 313146 - DNA, 25 bp, Probe Sequence
ttaccaggcatattccaaagcattg

SEQ ID NO: 313147 - DNA, 25 bp, Probe Sequence
ttactcacgtcatccagcagagaat

SEQ ID NO: 313148 - DNA, 25 bp, Probe Sequence
ttactacctatatggcatgatctat

SEQ ID NO: 313149 - DNA, 25 bp, Probe Sequence
ttactttctgtgttgaagcactgtt

SEQ ID NO: 313150 - DNA, 25 bp, Probe Sequence
ttagtgttttgctgaaatcctgttt

SEQ ID NO: 313151 - DNA, 25 bp, Probe Sequence
ttcagtggtttgtgctaatgtctcc

SEQ ID NO: 313152 - DNA, 25 bp, Probe Sequence
ttagctgggggtggtagcacatacc

SEQ ID NO: 313153 - DNA, 25 bp, Probe Sequence
ttactgggagtgagttcattgacca

SEQ ID NO: 313154 - DNA, 25 bp, Probe Sequence
ttcttggtagttctcttgggcagaa

SEQ ID NO: 313155 - DNA, 25 bp, Probe Sequence
ttaagtgggttgcttccaggcagaa

SEQ ID NO: 313156 - DNA, 25 bp, Probe Sequence
ttacgtaacttgccccttggcagaa

SEQ ID NO: 313157 - DNA, 25 bp, Probe Sequence
ttaccataagttcttttgcgagacc

SEQ ID NO: 313158 - DNA, 25 bp, Probe Sequence
ttaccaggtttcattttgggccttg

SEQ ID NO: 313159 - DNA, 25 bp, Probe Sequence
ttcacctggtttgtcctaaggccat

SEQ ID NO: 313160 - DNA, 25 bp, Probe Sequence
ttcacctggtttgtcctaaggccat

SEQ ID NO: 313161 - DNA, 25 bp, Probe Sequence
ttacttagattttctcctaggtgtt

SEQ ID NO: 313162 - DNA, 25 bp, Probe Sequence
ttacctaaattgtcctgaactttgt

SEQ ID NO: 313163 - DNA, 25 bp, Probe Sequence
ttacctgaaatttccagattgttct

SEQ ID NO: 313164 - DNA, 25 bp, Probe Sequence
ttacctataaccggacatatgagtc

SEQ ID NO: 313165 - DNA, 25 bp, Probe Sequence
ttagcactataagggcaggattgag

SEQ ID NO: 313166 - DNA, 25 bp, Probe Sequence
ttagcaggtatgatgctgggactgg

SEQ ID NO: 313167 - DNA, 25 bp, Probe Sequence
ttcaggcaatagaggaggacggggt

SEQ ID NO: 313168 - DNA, 25 bp, Probe Sequence
ttcagtgtgaccaggatgggcggga

SEQ ID NO: 313169 - DNA, 25 bp, Probe Sequence
ttcagggatgtcgtgggcgggggag

SEQ ID NO: 313170 - DNA, 25 bp, Probe Sequence
ttacgtgatggcgggtgggcagcgg

SEQ ID NO: 313171 - DNA, 25 bp, Probe Sequence
ttacgtgatggcgggtgggcagcgg

SEQ ID NO: 313172 - DNA, 25 bp, Probe Sequence
ttacctaggacagctggatctgggg

SEQ ID NO: 313173 - DNA, 25 bp, Probe Sequence
ttacacatagaagcattcatgcctg

SEQ ID NO: 313174 - DNA, 25 bp, Probe Sequence
ttcccaagccaattaagcctttcca

SEQ ID NO: 313175 - DNA, 25 bp, Probe Sequence
ttactacagccaaataatcagtgtt

SEQ ID NO: 313176 - DNA, 25 bp, Probe Sequence
ttaccaatgtgaaatatgtgtagtg

SEQ ID NO: 313177 - DNA, 25 bp, Probe Sequence
ttaaaatcttaattgttggctgggc

SEQ ID NO: 313178 - DNA, 25 bp, Probe Sequence
ttaaaagttgagtgggccgggcgcg

SEQ ID NO: 313179 - DNA, 25 bp, Probe Sequence
ttaaaaacgtgctcaggttgggagg

SEQ ID NO: 313180 - DNA, 25 bp, Probe Sequence
ttaacctaaggtcaagctgggagag

SEQ ID NO: 313181 - DNA, 25 bp, Probe Sequence
ttaagcttaaggtccagcagttgga

SEQ ID NO: 313182 - DNA, 25 bp, Probe Sequence
ttagagtataatgagcccgtgagga

SEQ ID NO: 313183 - DNA, 25 bp, Probe Sequence
ttaggttaaccacccagaggctcat

SEQ ID NO: 313184 - DNA, 25 bp, Probe Sequence
ttcactgtttcccagaccaaagcta

SEQ ID NO: 313185 - DNA, 25 bp, Probe Sequence
ttcagtttgctactaggtcaaaaga

SEQ ID NO: 313186 - DNA, 25 bp, Probe Sequence
ttagtttcttctccgtaaaatagag

SEQ ID NO: 313187 - DNA, 25 bp, Probe Sequence
ttactcctagcctgcttaaaaagag

SEQ ID NO: 313188 - DNA, 25 bp, Probe Sequence
ttaaaccctctgcctttgaaagtag

SEQ ID NO: 313189 - DNA, 25 bp, Probe Sequence
ttaactcttcttctgggggactgag

SEQ ID NO: 313190 - DNA, 25 bp, Probe Sequence
ttaaggtcccatctgtggggcctca

SEQ ID NO: 313191 - DNA, 25 bp, Probe Sequence
ttgaagttccacaggctaaagccca

SEQ ID NO: 313192 - DNA, 25 bp, Probe Sequence
ttaaattcagcaaagcctacaacgc

SEQ ID NO: 313193 - DNA, 25 bp, Probe Sequence
ttagaagtcactcacctaaaaaaca

SEQ ID NO: 313194 - DNA, 25 bp, Probe Sequence
ttagaaacatcctcaacctagaaaa

SEQ ID NO: 313195 - DNA, 25 bp, Probe Sequence
ttaaaaatccatgcacaatcaacaa

SEQ ID NO: 313196 - DNA, 25 bp, Probe Sequence
ttaataaatcttctgctacaatcaa

SEQ ID NO: 313197 - DNA, 25 bp, Probe Sequence
ttaaagttgcccctgtaatacataa

SEQ ID NO: 313198 - DNA, 25 bp, Probe Sequence
ttaaagttcctatttcagcataaag

SEQ ID NO: 313199 - DNA, 25 bp, Probe Sequence
ttaaagtctcccttgctcggaagaa

SEQ ID NO: 313200 - DNA, 25 bp, Probe Sequence
ttaaagaggcccttcagcggcgagt

SEQ ID NO: 313201 - DNA, 25 bp, Probe Sequence
ttaaagggtgactcgtcccacttgt

SEQ ID NO: 313202 - DNA, 25 bp, Probe Sequence
ttcaaaggtggagcccattcctctt

SEQ ID NO: 313203 - DNA, 25 bp, Probe Sequence
ttagaggttgaagcccaccttctct

SEQ ID NO: 313204 - DNA, 25 bp, Probe Sequence
ttagggtagagattcctgcccctcc

SEQ ID NO: 313205 - DNA, 25 bp, Probe Sequence
ttagggtagagattcctgcccctct

SEQ ID NO: 313206 - DNA, 25 bp, Probe Sequence
ttatggggctagttgtcctccaact

SEQ ID NO: 313207 - DNA, 25 bp, Probe Sequence
ttatggaggctgcttgggcaacaag

SEQ ID NO: 313208 - DNA, 25 bp, Probe Sequence
ttatggggctgcttttgtcacacta

SEQ ID NO: 313209 - DNA, 25 bp, Probe Sequence
ttatgtggcgtgttcatccccacgc

SEQ ID NO: 313210 - DNA, 25 bp, Probe Sequence
ttagttgtgttttctcagagccgcc

SEQ ID NO: 313211 - DNA, 25 bp, Probe Sequence
ttaggcatgtttaacatccagcact

SEQ ID NO: 313212 - DNA, 25 bp, Probe Sequence
ttaggctggtatggtgacacacacc

SEQ ID NO: 313213 - DNA, 25 bp, Probe Sequence
ttagcatgctggtagctgccatcca

SEQ ID NO: 313214 - DNA, 25 bp, Probe Sequence
ttagcatgcagagcagcaaagagag

SEQ ID NO: 313215 - DNA, 25 bp, Probe Sequence
ttagcagcaactacaaacacacctc

SEQ ID NO: 313216 - DNA, 25 bp, Probe Sequence
ttagatgcaggtcgtacataacttc

SEQ ID NO: 313217 - DNA, 25 bp, Probe Sequence
ttagtgagtggtcatctgaattttc

SEQ ID NO: 313218 - DNA, 25 bp, Probe Sequence
ttaggggtgtcatgctgttttcctg

SEQ ID NO: 313219 - DNA, 25 bp, Probe Sequence
ttacccgtgtgctatctgtatttcc

SEQ ID NO: 313220 - DNA, 25 bp, Probe Sequence
ttaccccagttgtcttatttaaatg

SEQ ID NO: 313221 - DNA, 25 bp, Probe Sequence
ttagcggtcaatttgcctttttaat

SEQ ID NO: 313222 - DNA, 25 bp, Probe Sequence
ttagtagctctagaacatttttaag

SEQ ID NO: 313223 - DNA, 25 bp, Probe Sequence
ttagtgacctatgacagtttgtcaa

SEQ ID NO: 313224 - DNA, 25 bp, Probe Sequence
ttaggatttctatagtttgatgatc

SEQ ID NO: 313225 - DNA, 25 bp, Probe Sequence
ttagtatttttgcctgttagtgatt

SEQ ID NO: 313226 - DNA, 25 bp, Probe Sequence
ttcaatttgaacccatttgaggttc

SEQ ID NO: 313227 - DNA, 25 bp, Probe Sequence
ttaagggataccaatttcctctctc

SEQ ID NO: 313228 - DNA, 25 bp, Probe Sequence
ttacaggcgttcgagtaccctatct

SEQ ID NO: 313229 - DNA, 25 bp, Probe Sequence
ttagggcaggattcttatccccatt

SEQ ID NO: 313230 - DNA, 25 bp, Probe Sequence
ttagggcactgggctgttgttccat

SEQ ID NO: 313231 - DNA, 25 bp, Probe Sequence
ttaggaagctggtcagttttacagt

SEQ ID NO: 313232 - DNA, 25 bp, Probe Sequence
ttaggcaagttgttgtattgtaatg

SEQ ID NO: 313233 - DNA, 25 bp, Probe Sequence
ttaggaagatcatatgtccgaaatc

SEQ ID NO: 313234 - DNA, 25 bp, Probe Sequence
ttaggcagaagctgatatcccagaa

SEQ ID NO: 313235 - DNA, 25 bp, Probe Sequence
ttagcttgaacaggcaacccaaact

SEQ ID NO: 313236 - DNA, 25 bp, Probe Sequence
ttagttgaacagggccctgaagcgc

SEQ ID NO: 313237 - DNA, 25 bp, Probe Sequence
ttcagtcccagaacctacagatacc

SEQ ID NO: 313238 - DNA, 25 bp, Probe Sequence
ttagtcctcataaaccacagataca

SEQ ID NO: 313239 - DNA, 25 bp, Probe Sequence
ttatgtcctcataaaagctcagatg

SEQ ID NO: 313240 - DNA, 25 bp, Probe Sequence
ttagaactccgattactgagatgca

SEQ ID NO: 313241 - DNA, 25 bp, Probe Sequence
ttagtgactcacttctagctgaaaa

SEQ ID NO: 313242 - DNA, 25 bp, Probe Sequence
ttaggtccagcagctacatttacac

SEQ ID NO: 313243 - DNA, 25 bp, Probe Sequence
ttacgtcgacagttgccagttacac

SEQ ID NO: 313244 - DNA, 25 bp, Probe Sequence
ttaatgcgggagctgcgatttacac

SEQ ID NO: 313245 - DNA, 25 bp, Probe Sequence
ttcagaggggagaggtactcgaccc

SEQ ID NO: 313246 - DNA, 25 bp, Probe Sequence
ttatggggaagcctggtacccctct

SEQ ID NO: 313247 - DNA, 25 bp, Probe Sequence
ttagcagggaaggctggtctccccc

SEQ ID NO: 313248 - DNA, 25 bp, Probe Sequence
ttaggggagatactggagctgacca

SEQ ID NO: 313249 - DNA, 25 bp, Probe Sequence
ttcggaggaacctgagtgcctcagt

SEQ ID NO: 313250 - DNA, 25 bp, Probe Sequence
ttcctaggggcctcgtgatctgagg

SEQ ID NO: 313251 - DNA, 25 bp, Probe Sequence
ttactgaaggagccccgagatgtgg

SEQ ID NO: 313252 - DNA, 25 bp, Probe Sequence
ttactcaatggtacccagggaggga

SEQ ID NO: 313253 - DNA, 25 bp, Probe Sequence
ttactcaaggataacacggcgatga

SEQ ID NO: 313254 - DNA, 25 bp, Probe Sequence
ttacctcagctatatcactgcccaa

SEQ ID NO: 313255 - DNA, 25 bp, Probe Sequence
ttagccatagatcattcctttcaac

SEQ ID NO: 313256 - DNA, 25 bp, Probe Sequence
ttagcaatatgacattcttggtgac

SEQ ID NO: 313257 - DNA, 25 bp, Probe Sequence
ttagaatgtgcaagcacttggggac

SEQ ID NO: 313258 - DNA, 25 bp, Probe Sequence
ttagaatctgcaacctgattgatta

SEQ ID NO: 313259 - DNA, 25 bp, Probe Sequence
ttagcgactgcgacgttcgatcttg

SEQ ID NO: 313260 - DNA, 25 bp, Probe Sequence
ttacgactacagccagtcagacttc

SEQ ID NO: 313261 - DNA, 25 bp, Probe Sequence
ttaccactaagacttctgactccaa

SEQ ID NO: 313262 - DNA, 25 bp, Probe Sequence
ttaccagtatagcttgcatagtcaa

SEQ ID NO: 313263 - DNA, 25 bp, Probe Sequence
ttaccaaaggtactgtcattgaagt

SEQ ID NO: 313264 - DNA, 25 bp, Probe Sequence
ttaccaaagttatttctataagctc

SEQ ID NO: 313265 - DNA, 25 bp, Probe Sequence
ttacccaagtcgtattcttaaatat

SEQ ID NO: 313266 - DNA, 25 bp, Probe Sequence
ttacttaagtaatcctctataaata

SEQ ID NO: 313267 - DNA, 25 bp, Probe Sequence
ttaattaagctaagcccttactaga

SEQ ID NO: 313268 - DNA, 25 bp, Probe Sequence
ttagaatattaaatccacttagtgg

SEQ ID NO: 313269 - DNA, 25 bp, Probe Sequence
ttaacattaatgcctacctaagtgg

SEQ ID NO: 313270 - DNA, 25 bp, Probe Sequence
ttaaattctcagccaacctacagcc

SEQ ID NO: 313271 - DNA, 25 bp, Probe Sequence
ttcaagggacggaaacatcagcacc

SEQ ID NO: 313272 - DNA, 25 bp, Probe Sequence
ttcaaggagcgtcggaacctgctgc

SEQ ID NO: 313273 - DNA, 25 bp, Probe Sequence
ttaaggcgcatgtggcacaccactc

SEQ ID NO: 313274 - DNA, 25 bp, Probe Sequence
ttacctgctgatgagtgcaacaagc

SEQ ID NO: 313275 - DNA, 25 bp, Probe Sequence
ttagcttgcaccttgtcacatagag

SEQ ID NO: 313276 - DNA, 25 bp, Probe Sequence
ttcagcttcatttgtgtcaatgggc

SEQ ID NO: 313277 - DNA, 25 bp, Probe Sequence
ttagcctctgtgtttcattaggcat

SEQ ID NO: 313278 - DNA, 25 bp, Probe Sequence
ttagcagctttgtcgtcatgtagca

SEQ ID NO: 313279 - DNA, 25 bp, Probe Sequence
ttaggctcagcttcagtcatgtgta

SEQ ID NO: 313280 - DNA, 25 bp, Probe Sequence
ttaggccctatattatggtgacacc

SEQ ID NO: 313281 - DNA, 25 bp, Probe Sequence
ttaggcctattttaggtgaccctat

SEQ ID NO: 313282 - DNA, 25 bp, Probe Sequence
ttaggcctatttaggtgacccctat

SEQ ID NO: 313283 - DNA, 25 bp, Probe Sequence
ttaggcctatttaggtgacactata

SEQ ID NO: 313284 - DNA, 25 bp, Probe Sequence
ttaggcctatttaggtgacactata

SEQ ID NO: 313285 - DNA, 25 bp, Probe Sequence
ttagagtttttctgaacctgatagt

SEQ ID NO: 313286 - DNA, 25 bp, Probe Sequence
ttaggttttacatgcctgctagaaa

SEQ ID NO: 313287 - DNA, 25 bp, Probe Sequence
ttagtttattaatgttcttgcgaaa

SEQ ID NO: 313288 - DNA, 25 bp, Probe Sequence
ttacttatatccccagttcctagat

SEQ ID NO: 313289 - DNA, 25 bp, Probe Sequence
ttacttttctccaaactactagtag

SEQ ID NO: 313290 - DNA, 25 bp, Probe Sequence
ttcactttgctttcagaactacgac

SEQ ID NO: 313291 - DNA, 25 bp, Probe Sequence
ttactatgttttgacttcctgacta

SEQ ID NO: 313292 - DNA, 25 bp, Probe Sequence
ttacttgtttttactatcctgttag

SEQ ID NO: 313293 - DNA, 25 bp, Probe Sequence
ttaatttttgagatcttactgcttg

SEQ ID NO: 313294 - DNA, 25 bp, Probe Sequence
ttaccttaaagcatcaccactcatt

SEQ ID NO: 313295 - DNA, 25 bp, Probe Sequence
ttaccttcagatgttcactaaataa

SEQ ID NO: 313296 - DNA, 25 bp, Probe Sequence
ttaggcttcgatggttcttccaacc

SEQ ID NO: 313297 - DNA, 25 bp, Probe Sequence
ttaggcattctatctttgctcaaat

SEQ ID NO: 313298 - DNA, 25 bp, Probe Sequence
ttatggcatttctatctattgtggc

SEQ ID NO: 313299 - DNA, 25 bp, Probe Sequence
ttcattctgttatctcaggtgagct

SEQ ID NO: 313300 - DNA, 25 bp, Probe Sequence
ttaactgacgtaccatggtagctta

SEQ ID NO: 313301 - DNA, 25 bp, Probe Sequence
ttaactgacagatgttaaagctttc

SEQ ID NO: 313302 - DNA, 25 bp, Probe Sequence
ttacctctcagttgttgaaacactt

SEQ ID NO: 313303 - DNA, 25 bp, Probe Sequence
ttcattcttcgtaattagtccgcct

SEQ ID NO: 313304 - DNA, 25 bp, Probe Sequence
ttactcgccattgattggtgcccac

SEQ ID NO: 313305 - DNA, 25 bp, Probe Sequence
ttactgccgagtggacctgctgtaa

SEQ ID NO: 313306 - DNA, 25 bp, Probe Sequence
ttactgccgagtggacctgctgtaa

SEQ ID NO: 313307 - DNA, 25 bp, Probe Sequence
ttactgccgagtggacctgctgtaa

SEQ ID NO: 313308 - DNA, 25 bp, Probe Sequence
ttactgccaagggagccatgtccac

SEQ ID NO: 313309 - DNA, 25 bp, Probe Sequence
ttacctcaatggggtcatgcccccg

SEQ ID NO: 313310 - DNA, 25 bp, Probe Sequence
ttacctaatggagatccatctgtcc

SEQ ID NO: 313311 - DNA, 25 bp, Probe Sequence
ttacctaatggagatccatctgtcc

SEQ ID NO: 313312 - DNA, 25 bp, Probe Sequence
ttagcagctacacaagatctgcctt

SEQ ID NO: 313313 - DNA, 25 bp, Probe Sequence
ttcacagtaaggaatgattgccaat

SEQ ID NO: 313314 - DNA, 25 bp, Probe Sequence
ttaccttcacgaatgatggcgctat

SEQ ID NO: 313315 - DNA, 25 bp, Probe Sequence
ttagcctggcacgatggtgggcact

SEQ ID NO: 313316 - DNA, 25 bp, Probe Sequence
ttagccgagcatggtggcgggcacc

SEQ ID NO: 313317 - DNA, 25 bp, Probe Sequence
ttagccgagcatggtggcgggcacc

SEQ ID NO: 313318 - DNA, 25 bp, Probe Sequence
ttagcacagacgctccagagggcac

SEQ ID NO: 313319 - DNA, 25 bp, Probe Sequence
ttagcaaacagcggcacgatggggc

SEQ ID NO: 313320 - DNA, 25 bp, Probe Sequence
ttaaagaccatccaggaggtggctg

SEQ ID NO: 313321 - DNA, 25 bp, Probe Sequence
ttagaagagtcccatgaaaggtggc

SEQ ID NO: 313322 - DNA, 25 bp, Probe Sequence
ttaaacagctgggagaaactgggaa

SEQ ID NO: 313323 - DNA, 25 bp, Probe Sequence
ttaaactggtcaatcaaaagggaga

SEQ ID NO: 313324 - DNA, 25 bp, Probe Sequence
ttaacatttgtcaatgaacatgggg

SEQ ID NO: 313325 - DNA, 25 bp, Probe Sequence
ttaacatttgtcaatgaacatgggg

SEQ ID NO: 313326 - DNA, 25 bp, Probe Sequence
ttcaactctgtgacacagcacatgt

SEQ ID NO: 313327 - DNA, 25 bp, Probe Sequence
ttaaattgggtaacatgtttttcat

SEQ ID NO: 313328 - DNA, 25 bp, Probe Sequence
ttactattgtgtgaggatgttgtta

SEQ ID NO: 313329 - DNA, 25 bp, Probe Sequence
ttacatatctgtttaggagtgtcta

SEQ ID NO: 313330 - DNA, 25 bp, Probe Sequence
ttacagactttgctggagtttcaag

SEQ ID NO: 313331 - DNA, 25 bp, Probe Sequence
ttacatccttcgattactattcgtg

SEQ ID NO: 313332 - DNA, 25 bp, Probe Sequence
ttagatctttccatttttctccatg

SEQ ID NO: 313333 - DNA, 25 bp, Probe Sequence
ttagtctaacacagttgaccctatt

SEQ ID NO: 313334 - DNA, 25 bp, Probe Sequence
ttagtcttacctagtctgaaacatt

SEQ ID NO: 313335 - DNA, 25 bp, Probe Sequence
ttaagattacctaccgaagcaacta

SEQ ID NO: 313336 - DNA, 25 bp, Probe Sequence
ttacagatgtgagccaccgtaccca

SEQ ID NO: 313337 - DNA, 25 bp, Probe Sequence
ttacaggaagtcccttgccatccta

SEQ ID NO: 313338 - DNA, 25 bp, Probe Sequence
ttacaggtatgtgccttctgcacct

SEQ ID NO: 313339 - DNA, 25 bp, Probe Sequence
ttacaggtgtgagcatagtgagacc

SEQ ID NO: 313340 - DNA, 25 bp, Probe Sequence
ttacaggtgtgagccactgcacccg

SEQ ID NO: 313341 - DNA, 25 bp, Probe Sequence
ttacgctgggcatacatatgcacac

SEQ ID NO: 313342 - DNA, 25 bp, Probe Sequence
ttaagcattggctgaaaatcactta

SEQ ID NO: 313343 - DNA, 25 bp, Probe Sequence
ttaagggttcggcaatcactgtcac

SEQ ID NO: 313344 - DNA, 25 bp, Probe Sequence
ttaagggttcggcaatcactgtcac

SEQ ID NO: 313345 - DNA, 25 bp, Probe Sequence
ttacactgggtaagaaacactgttt

SEQ ID NO: 313346 - DNA, 25 bp, Probe Sequence
ttacccctggataaaggcactttca

SEQ ID NO: 313347 - DNA, 25 bp, Probe Sequence
ttacccctcactaagaatccttgta

SEQ ID NO: 313348 - DNA, 25 bp, Probe Sequence
ttaaccctcaggcaaacctgtgttc

SEQ ID NO: 313349 - DNA, 25 bp, Probe Sequence
ttaacctctgcatgtgaaaactttt

SEQ ID NO: 313350 - DNA, 25 bp, Probe Sequence
ttgaaacttgcttacataaagttat

SEQ ID NO: 313351 - DNA, 25 bp, Probe Sequence
ttagaccttctctcatatacagcat

SEQ ID NO: 313352 - DNA, 25 bp, Probe Sequence
ttagagcctttcacctaatcatgtc

SEQ ID NO: 313353 - DNA, 25 bp, Probe Sequence
ttaagcaacttaaacataatattga

SEQ ID NO: 313354 - DNA, 25 bp, Probe Sequence
ttagagattgcttgaaaatgacatt

SEQ ID NO: 313355 - DNA, 25 bp, Probe Sequence
ttaggttgctataccaatggcttat

SEQ ID NO: 313356 - DNA, 25 bp, Probe Sequence
ttaggttgaaacatatctcttatct

SEQ ID NO: 313357 - DNA, 25 bp, Probe Sequence
ttagagttaagatatctcctctctt

SEQ ID NO: 313358 - DNA, 25 bp, Probe Sequence
ttagtgtctacataccatttctctc

SEQ ID NO: 313359 - DNA, 25 bp, Probe Sequence
ttaggttactcttcctcatagtcat

SEQ ID NO: 313360 - DNA, 25 bp, Probe Sequence
ttagggattccttccaatagttaga

SEQ ID NO: 313361 - DNA, 25 bp, Probe Sequence
ttagtaaatcccttcagtatttatc

SEQ ID NO: 313362 - DNA, 25 bp, Probe Sequence
ttaaaatacccaacatgtattatga

SEQ ID NO: 313363 - DNA, 25 bp, Probe Sequence
ttagagtttaccttcatatgtttga

SEQ ID NO: 313364 - DNA, 25 bp, Probe Sequence
ttactgcttgtgtccttattgttgg

SEQ ID NO: 313365 - DNA, 25 bp, Probe Sequence
ttctagctggttcttcacgtagtgg

SEQ ID NO: 313366 - DNA, 25 bp, Probe Sequence
ttagcagcggttattcggtgagcgg

SEQ ID NO: 313367 - DNA, 25 bp, Probe Sequence
ttacggcttttaatgcgggagctgc

SEQ ID NO: 313368 - DNA, 25 bp, Probe Sequence
ttactgacacttacatacttggacc

SEQ ID NO: 313369 - DNA, 25 bp, Probe Sequence
ttagattcactgatgtccttcagac

SEQ ID NO: 313370 - DNA, 25 bp, Probe Sequence
ttagtctagccttgtagctgttact

SEQ ID NO: 313371 - DNA, 25 bp, Probe Sequence
ttagatctattctgaagctgttcat

SEQ ID NO: 313372 - DNA, 25 bp, Probe Sequence
ttagcagatttcagcaactatccta

SEQ ID NO: 313373 - DNA, 25 bp, Probe Sequence
ttagctgtttccaaactacagtcct

SEQ ID NO: 313374 - DNA, 25 bp, Probe Sequence
ttagctttcccataagagctccctt

SEQ ID NO: 313375 - DNA, 25 bp, Probe Sequence
ttactttctctttagaagtgcactt

SEQ ID NO: 313376 - DNA, 25 bp, Probe Sequence
ttagattttttgaagaagcgcatct

SEQ ID NO: 313377 - DNA, 25 bp, Probe Sequence
ttaagtccttggaatgccagccacg

SEQ ID NO: 313378 - DNA, 25 bp, Probe Sequence
ttaaggcacctgctggttccaggac

SEQ ID NO: 313379 - DNA, 25 bp, Probe Sequence
ttagaggagggctccattccagggc

SEQ ID NO: 313380 - DNA, 25 bp, Probe Sequence
ttcttggtgggctgacattctccag

SEQ ID NO: 313381 - DNA, 25 bp, Probe Sequence
ttcagatgggggctggctacaccag

SEQ ID NO: 313382 - DNA, 25 bp, Probe Sequence
ttctctgagtggtgggacaactgca

SEQ ID NO: 313383 - DNA, 25 bp, Probe Sequence
ttctacgtgctgagcgagaccacct

SEQ ID NO: 313384 - DNA, 25 bp, Probe Sequence
ttccctgcacgatggaggccaatct

SEQ ID NO: 313385 - DNA, 25 bp, Probe Sequence
ttctgtagcacactgaggaaaaact

SEQ ID NO: 313386 - DNA, 25 bp, Probe Sequence
ttagctagacaccaaaatatcaatt

SEQ ID NO: 313387 - DNA, 25 bp, Probe Sequence
ttagcgtgacacttaatataacagt

SEQ ID NO: 313388 - DNA, 25 bp, Probe Sequence
ttacactcaaattaatcttgaagta

SEQ ID NO: 313389 - DNA, 25 bp, Probe Sequence
ttagcccaaatcagtgctgtaagaa

SEQ ID NO: 313390 - DNA, 25 bp, Probe Sequence
ttacccaccactctgcttaaaagtt

SEQ ID NO: 313391 - DNA, 25 bp, Probe Sequence
ttagacccctctctttattaagctt

SEQ ID NO: 313392 - DNA, 25 bp, Probe Sequence
ttagcccttcctccaattataagag

SEQ ID NO: 313393 - DNA, 25 bp, Probe Sequence
ttaccttttcccatcatcgatgata

SEQ ID NO: 313394 - DNA, 25 bp, Probe Sequence
ttacctttttcagatccaagcatat

SEQ ID NO: 313395 - DNA, 25 bp, Probe Sequence
ttacacccttgttctgtcaaagcaa

SEQ ID NO: 313396 - DNA, 25 bp, Probe Sequence
ttagccccgctgagcttggaggaag

SEQ ID NO: 313397 - DNA, 25 bp, Probe Sequence
ttaccccctagtgatggaatgacag

SEQ ID NO: 313398 - DNA, 25 bp, Probe Sequence
ttaccacttaaagaggaaccagagc

SEQ ID NO: 313399 - DNA, 25 bp, Probe Sequence
ttaccctccaaaagcaagtagccaa

SEQ ID NO: 313400 - DNA, 25 bp, Probe Sequence
ttaacttacaaagctagttgccata

SEQ ID NO: 313401 - DNA, 25 bp, Probe Sequence
ttaactatgatctccctaataacag

SEQ ID NO: 313402 - DNA, 25 bp, Probe Sequence
ttaagtgcagaaataactaagacac

SEQ ID NO: 313403 - DNA, 25 bp, Probe Sequence
ttagagatacaaagtactactacaa

SEQ ID NO: 313404 - DNA, 25 bp, Probe Sequence
ttaactgcacagagggctacttcat

SEQ ID NO: 313405 - DNA, 25 bp, Probe Sequence
ttacctacaattgctgcttctggct

SEQ ID NO: 313406 - DNA, 25 bp, Probe Sequence
ttactgtgtcaattcctattttctt

SEQ ID NO: 313407 - DNA, 25 bp, Probe Sequence
ttagcagattctctcctagtttggc

SEQ ID NO: 313408 - DNA, 25 bp, Probe Sequence
ttaagttttcccaagcttgcatctc

SEQ ID NO: 313409 - DNA, 25 bp, Probe Sequence
ttaatttggtgcctgcaactttctt

SEQ ID NO: 313410 - DNA, 25 bp, Probe Sequence
ttcacaatgtggccgaggactttga

SEQ ID NO: 313411 - DNA, 25 bp, Probe Sequence
ttacatatcacctcatggcctatta

SEQ ID NO: 313412 - DNA, 25 bp, Probe Sequence
ttagtctctatcttcaggttattat

SEQ ID NO: 313413 - DNA, 25 bp, Probe Sequence
ttactctctatgcacggtttgtgat

SEQ ID NO: 313414 - DNA, 25 bp, Probe Sequence
ttactacactcaacggtttggatcc

SEQ ID NO: 313415 - DNA, 25 bp, Probe Sequence
ttactagcctagaccagtatgtgga

SEQ ID NO: 313416 - DNA, 25 bp, Probe Sequence
ttacctgcgtagtccagtttcagcc

SEQ ID NO: 313417 - DNA, 25 bp, Probe Sequence
ttactctggtatttatctcttcgct

SEQ ID NO: 313418 - DNA, 25 bp, Probe Sequence
ttacctgcctgaagaaattctgcct

SEQ ID NO: 313419 - DNA, 25 bp, Probe Sequence
ttacctgcctgtagacaagtctctc

SEQ ID NO: 313420 - DNA, 25 bp, Probe Sequence
ttacctctatgtggccaatggctcc

SEQ ID NO: 313421 - DNA, 25 bp, Probe Sequence
ttactctgctatgactctgtcttcc

SEQ ID NO: 313422 - DNA, 25 bp, Probe Sequence
ttagctgctttatcatctttaccca

SEQ ID NO: 313423 - DNA, 25 bp, Probe Sequence
ttaatgccattatcctgaattcccc

SEQ ID NO: 313424 - DNA, 25 bp, Probe Sequence
ttaagcacttactctgcagtttcct

SEQ ID NO: 313425 - DNA, 25 bp, Probe Sequence
ttagtccttacatcacttctagctc

SEQ ID NO: 313426 - DNA, 25 bp, Probe Sequence
ttagttttgccatcacattgtcacc

SEQ ID NO: 313427 - DNA, 25 bp, Probe Sequence
ttagtatctactcccaattgtcagc

SEQ ID NO: 313428 - DNA, 25 bp, Probe Sequence
ttagctttgcacttctaactgtgca

SEQ ID NO: 313429 - DNA, 25 bp, Probe Sequence
ttaactggcactactaactgaaggc

SEQ ID NO: 313430 - DNA, 25 bp, Probe Sequence
ttacctggcactagcaacattagaa

SEQ ID NO: 313431 - DNA, 25 bp, Probe Sequence
ttagcttcacacatgaaattgagaa

SEQ ID NO: 313432 - DNA, 25 bp, Probe Sequence
ttactctctccatataatttctata

SEQ ID NO: 313433 - DNA, 25 bp, Probe Sequence
ttacatgtctcctataaatacttta

SEQ ID NO: 313434 - DNA, 25 bp, Probe Sequence
ttaacctcctaagtatcaagtatag

SEQ ID NO: 313435 - DNA, 25 bp, Probe Sequence
ttgaatcgggtaactatcaacttca

SEQ ID NO: 313436 - DNA, 25 bp, Probe Sequence
ttaactggcctgatctaacaatgaa

SEQ ID NO: 313437 - DNA, 25 bp, Probe Sequence
ttactcaaggctcttaccagtgaat

SEQ ID NO: 313438 - DNA, 25 bp, Probe Sequence
ttcaccatttgtattcaacgtagta

SEQ ID NO: 313439 - DNA, 25 bp, Probe Sequence
ttaccctctgaacttctgatcgaag

SEQ ID NO: 313440 - DNA, 25 bp, Probe Sequence
ttaccctctgaacttctgatcgaag

SEQ ID NO: 313441 - DNA, 25 bp, Probe Sequence
ttacttgcttccattgtgtctgaaa

SEQ ID NO: 313442 - DNA, 25 bp, Probe Sequence
ttacttttcctatttcttacaatcg

SEQ ID NO: 313443 - DNA, 25 bp, Probe Sequence
ttactgctttcagtcgacctgataa

SEQ ID NO: 313444 - DNA, 25 bp, Probe Sequence
ttacgtcatgtcattggtgtgataa

SEQ ID NO: 313445 - DNA, 25 bp, Probe Sequence
ttacgtctgatcttgatgggggcac

SEQ ID NO: 313446 - DNA, 25 bp, Probe Sequence
ttcagcggtaccgggaggtgcacga

SEQ ID NO: 313447 - DNA, 25 bp, Probe Sequence
ttcactggttatgcggcggatccga

SEQ ID NO: 313448 - DNA, 25 bp, Probe Sequence
ttacttttttgaccacgagccatga

SEQ ID NO: 313449 - DNA, 25 bp, Probe Sequence
ttactttttaatcacgagtattttg

SEQ ID NO: 313450 - DNA, 25 bp, Probe Sequence
ttactcttcttgttaactagtcatt

SEQ ID NO: 313451 - DNA, 25 bp, Probe Sequence
ttacatcttctttaaagccaaatgg

SEQ ID NO: 313452 - DNA, 25 bp, Probe Sequence
ttacatcttcagaacaagagctaga

SEQ ID NO: 313453 - DNA, 25 bp, Probe Sequence
ttagctgtgatcatccacaagccaa

SEQ ID NO: 313454 - DNA, 25 bp, Probe Sequence
ttagatggacgcactgggcagcaac

SEQ ID NO: 313455 - DNA, 25 bp, Probe Sequence
ttacattgagcggctctgggcctac

SEQ ID NO: 313456 - DNA, 25 bp, Probe Sequence
ttagcatatggggcctgacttctct

SEQ ID NO: 313457 - DNA, 25 bp, Probe Sequence
ttagcttgggtggatgctgctcatt

SEQ ID NO: 313458 - DNA, 25 bp, Probe Sequence
ttgaggggcgagtagcagctctgca

SEQ ID NO: 313459 - DNA, 25 bp, Probe Sequence
ttcaggattgggaaacatctgggct

SEQ ID NO: 313460 - DNA, 25 bp, Probe Sequence
ttcaggatggtgggaaatccccaaa

SEQ ID NO: 313461 - DNA, 25 bp, Probe Sequence
ttcaggtcatgggagcaaattcctc

SEQ ID NO: 313462 - DNA, 25 bp, Probe Sequence
ttaagatctgcgctcaaatctcctc

SEQ ID NO: 313463 - DNA, 25 bp, Probe Sequence
ttaaggctaggttaggccctgcact

SEQ ID NO: 313464 - DNA, 25 bp, Probe Sequence
ttactggaaggttatacctctcatt

SEQ ID NO: 313465 - DNA, 25 bp, Probe Sequence
ttacgactactgtgatgtccctcag

SEQ ID NO: 313466 - DNA, 25 bp, Probe Sequence
ttaacttgactatattctgcactag

SEQ ID NO: 313467 - DNA, 25 bp, Probe Sequence
ttaccattccttattatcactaatc

SEQ ID NO: 313468 - DNA, 25 bp, Probe Sequence
ttacctttctctattacagcttaaa

SEQ ID NO: 313469 - DNA, 25 bp, Probe Sequence
ttacacgttcaacttttgcctgtaa

SEQ ID NO: 313470 - DNA, 25 bp, Probe Sequence
ttaccagcttcagatctttgctcaa

SEQ ID NO: 313471 - DNA, 25 bp, Probe Sequence
ttaaagcaacaggcctttctcaggt

SEQ ID NO: 313472 - DNA, 25 bp, Probe Sequence
ttgaaaatggggctttccagggaat

SEQ ID NO: 313473 - DNA, 25 bp, Probe Sequence
ttgaaaatctggcttgttacaggcg

SEQ ID NO: 313474 - DNA, 25 bp, Probe Sequence
ttgagcacaggctggtttaccatgg

SEQ ID NO: 313475 - DNA, 25 bp, Probe Sequence
ttagctcgctcattttttaccatgt

SEQ ID NO: 313476 - DNA, 25 bp, Probe Sequence
ttagcctgcatatttatatttactt

SEQ ID NO: 313477 - DNA, 25 bp, Probe Sequence
ttagccatgtattgtgatttgtcct

SEQ ID NO: 313478 - DNA, 25 bp, Probe Sequence
ttagccttatcttaatctgtcccaa

SEQ ID NO: 313479 - DNA, 25 bp, Probe Sequence
ttacctttgcaagattgacctcatc

SEQ ID NO: 313480 - DNA, 25 bp, Probe Sequence
ttaactttcaaggggcagggcatac

SEQ ID NO: 313481 - DNA, 25 bp, Probe Sequence
ttaactttcaaggggcagggcatac

SEQ ID NO: 313482 - DNA, 25 bp, Probe Sequence
ttaaatttgaagatgggatgtgtac

SEQ ID NO: 313483 - DNA, 25 bp, Probe Sequence
ttaattgtgatggggtgggtgtgaa

SEQ ID NO: 313484 - DNA, 25 bp, Probe Sequence
ttactgtggggtggggctgttgata

SEQ ID NO: 313485 - DNA, 25 bp, Probe Sequence
ttacttcgacgatgtgcctttgatt

SEQ ID NO: 313486 - DNA, 25 bp, Probe Sequence
ttgactcaagtccacgtttcctgag

SEQ ID NO: 313487 - DNA, 25 bp, Probe Sequence
ttaatcccacgaggaagctgcctga

SEQ ID NO: 313488 - DNA, 25 bp, Probe Sequence
ttcaacttccgagcgagcgcggagc

SEQ ID NO: 313489 - DNA, 25 bp, Probe Sequence
ttacaactcaaaccgggctgggcaa

SEQ ID NO: 313490 - DNA, 25 bp, Probe Sequence
ttaaactagacacttgaggctagga

SEQ ID NO: 313491 - DNA, 25 bp, Probe Sequence
ttaacctgactcatcgaggtgagac

SEQ ID NO: 313492 - DNA, 25 bp, Probe Sequence
ttacctcgtccgagtggtgagcacc

SEQ ID NO: 313493 - DNA, 25 bp, Probe Sequence
ttacttgaatcccatgggggtccca

SEQ ID NO: 313494 - DNA, 25 bp, Probe Sequence
ttaaagagatcctggggactgccca

SEQ ID NO: 313495 - DNA, 25 bp, Probe Sequence
ttgagaaagccctggggatgaagct

SEQ ID NO: 313496 - DNA, 25 bp, Probe Sequence
ttaaaaggcccacgggtgcaccagg

SEQ ID NO: 313497 - DNA, 25 bp, Probe Sequence
ttacaaacccacaaggagtcccttg

SEQ ID NO: 313498 - DNA, 25 bp, Probe Sequence
ttaaaaggctcccatgtgagtccct

SEQ ID NO: 313499 - DNA, 25 bp, Probe Sequence
ttaaaaggctcccatgtgagtccct

SEQ ID NO: 313500 - DNA, 25 bp, Probe Sequence
ttaaaaggctcccatgtgagtccct

SEQ ID NO: 313501 - DNA, 25 bp, Probe Sequence
ttaaaggagttcctgtcacctgctc

SEQ ID NO: 313502 - DNA, 25 bp, Probe Sequence
ttaaagaggattttgtgcctgtgca

SEQ ID NO: 313503 - DNA, 25 bp, Probe Sequence
ttaataaagctccattgtgcctgca

SEQ ID NO: 313504 - DNA, 25 bp, Probe Sequence
ttgattatcaaggactttcactgca

SEQ ID NO: 313505 - DNA, 25 bp, Probe Sequence
ttagctctaggccactttacgcaac

SEQ ID NO: 313506 - DNA, 25 bp, Probe Sequence
ttcagggaaggggcgggcgtgtcgc

SEQ ID NO: 313507 - DNA, 25 bp, Probe Sequence
ttaaggaccctgggggctgtgctag

SEQ ID NO: 313508 - DNA, 25 bp, Probe Sequence
ttaaggaccctgggggctgtgctag

SEQ ID NO: 313509 - DNA, 25 bp, Probe Sequence
ttaagaagtcgtggctaggtgttgt

SEQ ID NO: 313510 - DNA, 25 bp, Probe Sequence
ttaaacaccgtgctgaggcggcttc

SEQ ID NO: 313511 - DNA, 25 bp, Probe Sequence
ttacaacccggcctacatggatgcc

SEQ ID NO: 313512 - DNA, 25 bp, Probe Sequence
ttacaacccggcctacatggatgcc

SEQ ID NO: 313513 - DNA, 25 bp, Probe Sequence
ttacaacccggcctacatggatgcc

SEQ ID NO: 313514 - DNA, 25 bp, Probe Sequence
ttacacataccctcttcatggatgg

SEQ ID NO: 313515 - DNA, 25 bp, Probe Sequence
ttgacctaggccaattcttggtagt

SEQ ID NO: 313516 - DNA, 25 bp, Probe Sequence
ttgacctgagggacattccgtttga

SEQ ID NO: 313517 - DNA, 25 bp, Probe Sequence
ttctccatagtggctgtaccagttt

SEQ ID NO: 313518 - DNA, 25 bp, Probe Sequence
ttgtgccttcgtggtactcatggct

SEQ ID NO: 313519 - DNA, 25 bp, Probe Sequence
ttacctttgttgcagctgctgttgc

SEQ ID NO: 313520 - DNA, 25 bp, Probe Sequence
ttacttatttctcggtgctttgcac

SEQ ID NO: 313521 - DNA, 25 bp, Probe Sequence
ttactgtacttgctgggtcttgcca

SEQ ID NO: 313522 - DNA, 25 bp, Probe Sequence
ttactgtgactgagtcggcccattc

SEQ ID NO: 313523 - DNA, 25 bp, Probe Sequence
ttactatgattgtgtatgtgccgct

SEQ ID NO: 313524 - DNA, 25 bp, Probe Sequence
ttaattcatctttgtgatcccctac

SEQ ID NO: 313525 - DNA, 25 bp, Probe Sequence
ttaaacctgtgtggcaatccctgac

SEQ ID NO: 313526 - DNA, 25 bp, Probe Sequence
ttcaggaccttgaggacacgtgacc

SEQ ID NO: 313527 - DNA, 25 bp, Probe Sequence
ttacgccgctttctgacactttcac

SEQ ID NO: 313528 - DNA, 25 bp, Probe Sequence
ttagcccgctccttggaagttagac

SEQ ID NO: 313529 - DNA, 25 bp, Probe Sequence
ttgactcgggccttagaactttgca

SEQ ID NO: 313530 - DNA, 25 bp, Probe Sequence
ttacttgctaccctgagtactttca

SEQ ID NO: 313531 - DNA, 25 bp, Probe Sequence
ttactcttcctcatagtcatcattg

SEQ ID NO: 313532 - DNA, 25 bp, Probe Sequence
ttagctcattctccttgtgttacta

SEQ ID NO: 313533 - DNA, 25 bp, Probe Sequence
ttagaagtcatccttctgattattt

SEQ ID NO: 313534 - DNA, 25 bp, Probe Sequence
ttaaaccatagttcttgcttttttg

SEQ ID NO: 313535 - DNA, 25 bp, Probe Sequence
ttaaacaaaatctcttctacttgga

SEQ ID NO: 313536 - DNA, 25 bp, Probe Sequence
ttacaaaacatttctcttcttcctg

SEQ ID NO: 313537 - DNA, 25 bp, Probe Sequence
ttaaaaaacctgccttcctgcagcc

SEQ ID NO: 313538 - DNA, 25 bp, Probe Sequence
ttaaaagcaagtcatagttctgccc

SEQ ID NO: 313539 - DNA, 25 bp, Probe Sequence
ttagaaagcaacttatcagctactt

SEQ ID NO: 313540 - DNA, 25 bp, Probe Sequence
ttagaatccacaatatatcacaaat

SEQ ID NO: 313541 - DNA, 25 bp, Probe Sequence
ttagatttctcatttgccaataata

SEQ ID NO: 313542 - DNA, 25 bp, Probe Sequence
ttagctatgtttttcccatcagaat

SEQ ID NO: 313543 - DNA, 25 bp, Probe Sequence
ttagctattagtgacctatgacagt

SEQ ID NO: 313544 - DNA, 25 bp, Probe Sequence
ttagcatttactgtagttggaggat

SEQ ID NO: 313545 - DNA, 25 bp, Probe Sequence
ttacattttctggtactctgtgaaa

SEQ ID NO: 313546 - DNA, 25 bp, Probe Sequence
ttaaatacatcgtgacctgtgtaat

SEQ ID NO: 313547 - DNA, 25 bp, Probe Sequence
ttaaatgcaatcttggatggctttt

SEQ ID NO: 313548 - DNA, 25 bp, Probe Sequence
ttaaatattcagttatggtactatg

SEQ ID NO: 313549 - DNA, 25 bp, Probe Sequence
ttaacatcgtagtcctagtttgcat

SEQ ID NO: 313550 - DNA, 25 bp, Probe Sequence
ttaaactgtcagtcgaacaagtcat

SEQ ID NO: 313551 - DNA, 25 bp, Probe Sequence
ttaaactttgtgaagaccaatattt

SEQ ID NO: 313552 - DNA, 25 bp, Probe Sequence
ttaaaaattgttaacacaccattgc

SEQ ID NO: 313553 - DNA, 25 bp, Probe Sequence
ttactaatatatctgtaacactatt

SEQ ID NO: 313554 - DNA, 25 bp, Probe Sequence
ttgaattgtgcaatttgtagaactt

SEQ ID NO: 313555 - DNA, 25 bp, Probe Sequence
ttagatgtgtgttatctgtaaccat

SEQ ID NO: 313556 - DNA, 25 bp, Probe Sequence
ttaatgtcatattcatctggtaaat

SEQ ID NO: 313557 - DNA, 25 bp, Probe Sequence
ttagacttcatattattgtatcata

SEQ ID NO: 313558 - DNA, 25 bp, Probe Sequence
ttaacttattcttcgtctttttgct

SEQ ID NO: 313559 - DNA, 25 bp, Probe Sequence
ttaagattagggtggcattgctttt

SEQ ID NO: 313560 - DNA, 25 bp, Probe Sequence
ttaaagttgaactaagattctatct

SEQ ID NO: 313561 - DNA, 25 bp, Probe Sequence
ttaaattgttaggaggcttggagct

SEQ ID NO: 313562 - DNA, 25 bp, Probe Sequence
ttacttctcttaggtggctctggga

SEQ ID NO: 313563 - DNA, 25 bp, Probe Sequence
ttaattcatcctcagtgactctggc

SEQ ID NO: 313564 - DNA, 25 bp, Probe Sequence
ttacattcttctgatgtaacatgtg

SEQ ID NO: 313565 - DNA, 25 bp, Probe Sequence
ttcaaggcatttgttgctatcgggg

SEQ ID NO: 313566 - DNA, 25 bp, Probe Sequence
ttcaagccgattctagttctgcctg

SEQ ID NO: 313567 - DNA, 25 bp, Probe Sequence
ttcagggctaccttatttctactaa

SEQ ID NO: 313568 - DNA, 25 bp, Probe Sequence
ttcagggtatccggtattttgtaat

SEQ ID NO: 313569 - DNA, 25 bp, Probe Sequence
ttgaggttccttgtacgattgtaga

SEQ ID NO: 313570 - DNA, 25 bp, Probe Sequence
ttgactttcctgtttactgtcgggc

SEQ ID NO: 313571 - DNA, 25 bp, Probe Sequence
ttactgtaactgattacacttggta

SEQ ID NO: 313572 - DNA, 25 bp, Probe Sequence
ttagagataaggattgcacattgga

SEQ ID NO: 313573 - DNA, 25 bp, Probe Sequence
ttagcagctaggattctcaaatgga

SEQ ID NO: 313574 - DNA, 25 bp, Probe Sequence
ttcaggtacgaaaccatcaatggac

SEQ ID NO: 313575 - DNA, 25 bp, Probe Sequence
ttcaggtacaactggccacagagat

SEQ ID NO: 313576 - DNA, 25 bp, Probe Sequence
ttagaaatagactagaccaagcaga

SEQ ID NO: 313577 - DNA, 25 bp, Probe Sequence
ttaccagcaaaattaccagaacagt

SEQ ID NO: 313578 - DNA, 25 bp, Probe Sequence
ttaccagagtaagttgccaaaatgt

SEQ ID NO: 313579 - DNA, 25 bp, Probe Sequence
ttaccagtaagagcttgcaaatatg

SEQ ID NO: 313580 - DNA, 25 bp, Probe Sequence
ttaacaatgaaaactgtcactaagg

SEQ ID NO: 313581 - DNA, 25 bp, Probe Sequence
ttaacaatgggaaccccttgtgagc

SEQ ID NO: 313582 - DNA, 25 bp, Probe Sequence
ttaataatggagtccctgtctttaa

SEQ ID NO: 313583 - DNA, 25 bp, Probe Sequence
ttaataatatcggccgctgtttgta

SEQ ID NO: 313584 - DNA, 25 bp, Probe Sequence
ttaaaaattacattcttctgatgta

SEQ ID NO: 313585 - DNA, 25 bp, Probe Sequence
ttaaaaattccacattgaagttgtg

SEQ ID NO: 313586 - DNA, 25 bp, Probe Sequence
ttaacaaatttctgattacatttcc

SEQ ID NO: 313587 - DNA, 25 bp, Probe Sequence
ttaacaaacattcgtgcttactttt

SEQ ID NO: 313588 - DNA, 25 bp, Probe Sequence
ttaatacccttcacattactccaat

SEQ ID NO: 313589 - DNA, 25 bp, Probe Sequence
ttactacctcttaacctaaagcaat

SEQ ID NO: 313590 - DNA, 25 bp, Probe Sequence
ttactattcctaacccgaatgaaat

SEQ ID NO: 313591 - DNA, 25 bp, Probe Sequence
ttactattcctaacccgaatgaaat

SEQ ID NO: 313592 - DNA, 25 bp, Probe Sequence
ttagctattttttcactgggtaaat

SEQ ID NO: 313593 - DNA, 25 bp, Probe Sequence
ttgaggtactcataccttggtaaag

SEQ ID NO: 313594 - DNA, 25 bp, Probe Sequence
ttaagcaactcatcctgtaagtaaa

SEQ ID NO: 313595 - DNA, 25 bp, Probe Sequence
ttcctgccaccaggcctttttaaat

SEQ ID NO: 313596 - DNA, 25 bp, Probe Sequence
ttgttccaagacacccacttaagtt

SEQ ID NO: 313597 - DNA, 25 bp, Probe Sequence
ttggcctaggaatccttttagagtt

SEQ ID NO: 313598 - DNA, 25 bp, Probe Sequence
ttacctagtgaaacttttctagaat

SEQ ID NO: 313599 - DNA, 25 bp, Probe Sequence
ttacccgaaaccattctcttgaatt

SEQ ID NO: 313600 - DNA, 25 bp, Probe Sequence
ttaacggaaataacttcgatctgat

SEQ ID NO: 313601 - DNA, 25 bp, Probe Sequence
ttaccggaaaggactcttgattctt

SEQ ID NO: 313602 - DNA, 25 bp, Probe Sequence
ttaccgagcactgtgacctttcttt

SEQ ID NO: 313603 - DNA, 25 bp, Probe Sequence
ttaccacagactcttttttcatttt

SEQ ID NO: 313604 - DNA, 25 bp, Probe Sequence
ttaccaagaggcttcttcttttctt

SEQ ID NO: 313605 - DNA, 25 bp, Probe Sequence
ttactcaattggttactctcatttg

SEQ ID NO: 313606 - DNA, 25 bp, Probe Sequence
ttactccactggtagtcatctggtg

SEQ ID NO: 313607 - DNA, 25 bp, Probe Sequence
ttagcatccactatactcatcttat

SEQ ID NO: 313608 - DNA, 25 bp, Probe Sequence
ttactagcgcaatactgcacttgta

SEQ ID NO: 313609 - DNA, 25 bp, Probe Sequence
ttactatccaagagctgtttgaaaa

SEQ ID NO: 313610 - DNA, 25 bp, Probe Sequence
ttactcacaagagggctttggaaag

SEQ ID NO: 313611 - DNA, 25 bp, Probe Sequence
ttacctgcccacgagttctggaaag

SEQ ID NO: 313612 - DNA, 25 bp, Probe Sequence
ttaacatgaacagatttcttgaata

SEQ ID NO: 313613 - DNA, 25 bp, Probe Sequence
ttaaggcaacaggtcttcataatta

SEQ ID NO: 313614 - DNA, 25 bp, Probe Sequence
ttaactccacgctttacgatattat

SEQ ID NO: 313615 - DNA, 25 bp, Probe Sequence
ttaaccgccttattagccagattgt

SEQ ID NO: 313616 - DNA, 25 bp, Probe Sequence
ttacatccggccatggacgcaatgg

SEQ ID NO: 313617 - DNA, 25 bp, Probe Sequence
ttaatcacgcgatgttgactgcaca

SEQ ID NO: 313618 - DNA, 25 bp, Probe Sequence
ttcaatacgcgggatagccccaaat

SEQ ID NO: 313619 - DNA, 25 bp, Probe Sequence
ttacaaaccctatgcccagaatcat

SEQ ID NO: 313620 - DNA, 25 bp, Probe Sequence
ttaaagtgccttcagccaagaccat

SEQ ID NO: 313621 - DNA, 25 bp, Probe Sequence
ttaaagcctcttcatccaggtcagt

SEQ ID NO: 313622 - DNA, 25 bp, Probe Sequence
ttaagcagcactatccaacaggacc

SEQ ID NO: 313623 - DNA, 25 bp, Probe Sequence
ttaaagaaatctgacagagccatcc

SEQ ID NO: 313624 - DNA, 25 bp, Probe Sequence
ttcacttaactcccagcaaacatcc

SEQ ID NO: 313625 - DNA, 25 bp, Probe Sequence
ttagctcctattgatgcaccaaacc

SEQ ID NO: 313626 - DNA, 25 bp, Probe Sequence
ttcagacacctagatcccagaactc

SEQ ID NO: 313627 - DNA, 25 bp, Probe Sequence
ttaaccctgagaattccaagctgtc

SEQ ID NO: 313628 - DNA, 25 bp, Probe Sequence
ttaatcccggtttcagaagctgcag

SEQ ID NO: 313629 - DNA, 25 bp, Probe Sequence
ttaacctcaggttccaaattcagta

SEQ ID NO: 313630 - DNA, 25 bp, Probe Sequence
ttaactcctctgaaccacagttcca

SEQ ID NO: 313631 - DNA, 25 bp, Probe Sequence
ttgtcctccttggtaccgtatcaag

SEQ ID NO: 313632 - DNA, 25 bp, Probe Sequence
ttacctgcaccgttgactcagtata

SEQ ID NO: 313633 - DNA, 25 bp, Probe Sequence
ttaccagatccgtgatgccacttac

SEQ ID NO: 313634 - DNA, 25 bp, Probe Sequence
ttgtcacaaccaaggtcccatttcc

SEQ ID NO: 313635 - DNA, 25 bp, Probe Sequence
ttacaaacccaactactcatttcct

SEQ ID NO: 313636 - DNA, 25 bp, Probe Sequence
ttaataaccaatatatcgtgtatcc

SEQ ID NO: 313637 - DNA, 25 bp, Probe Sequence
ttaaagtcctacgtgatctgagttc

SEQ ID NO: 313638 - DNA, 25 bp, Probe Sequence
ttaaagcttctctgctgattgtgat

SEQ ID NO: 313639 - DNA, 25 bp, Probe Sequence
ttaaatcccttcctgatagcttggc

SEQ ID NO: 313640 - DNA, 25 bp, Probe Sequence
ttaaaaatttgctgaatgcttgcta

SEQ ID NO: 313641 - DNA, 25 bp, Probe Sequence
ttaaaattactctgcagcaattctg

SEQ ID NO: 313642 - DNA, 25 bp, Probe Sequence
ttaaaataatccctgacaatatctt

SEQ ID NO: 313643 - DNA, 25 bp, Probe Sequence
ttaaaatttcatagctgtacttctt

SEQ ID NO: 313644 - DNA, 25 bp, Probe Sequence
ttcaaatatcccgtgttacctttct

SEQ ID NO: 313645 - DNA, 25 bp, Probe Sequence
ttacaaggtcctttctaacactctc

SEQ ID NO: 313646 - DNA, 25 bp, Probe Sequence
ttgatgaaggctccatcatctttaa

SEQ ID NO: 313647 - DNA, 25 bp, Probe Sequence
ttagcagttctcgatccattctaga

SEQ ID NO: 313648 - DNA, 25 bp, Probe Sequence
ttagctgctctcaaattgatctcta

SEQ ID NO: 313649 - DNA, 25 bp, Probe Sequence
ttagcattcccaatagatcctatca

SEQ ID NO: 313650 - DNA, 25 bp, Probe Sequence
ttcagcattggctctacagcgttgc

SEQ ID NO: 313651 - DNA, 25 bp, Probe Sequence
ttaattagaactatgctggatgctg

SEQ ID NO: 313652 - DNA, 25 bp, Probe Sequence
ttcagtggagaaaattgcttgggaa

SEQ ID NO: 313653 - DNA, 25 bp, Probe Sequence
ttagctttgaacattcctggcgcat

SEQ ID NO: 313654 - DNA, 25 bp, Probe Sequence
ttagcttctagaaatgtagggcaca

SEQ ID NO: 313655 - DNA, 25 bp, Probe Sequence
ttagcttcaggatcagctgggggta

SEQ ID NO: 313656 - DNA, 25 bp, Probe Sequence
ttcagttcaagttgcccgacgtgta

SEQ ID NO: 313657 - DNA, 25 bp, Probe Sequence
ttcaatgaagagtgtccccggctca

SEQ ID NO: 313658 - DNA, 25 bp, Probe Sequence
ttcacagatcggtgtaatcctgaga

SEQ ID NO: 313659 - DNA, 25 bp, Probe Sequence
ttcacctggccaggatacccgagtg

SEQ ID NO: 313660 - DNA, 25 bp, Probe Sequence
ttaccatgagactgccagctccaag

SEQ ID NO: 313661 - DNA, 25 bp, Probe Sequence
ttacgtgagatgttgctgcagccag

SEQ ID NO: 313662 - DNA, 25 bp, Probe Sequence
ttagcatgatagtcatttgcccgtc

SEQ ID NO: 313663 - DNA, 25 bp, Probe Sequence
ttagctcagtgacttgtccacactc

SEQ ID NO: 313664 - DNA, 25 bp, Probe Sequence
ttagctgagtgtggtggcgcatgcc

SEQ ID NO: 313665 - DNA, 25 bp, Probe Sequence
ttagctaggcatggtagcgcctgcc

SEQ ID NO: 313666 - DNA, 25 bp, Probe Sequence
ttagctgggcatggtggcaggcacc

SEQ ID NO: 313667 - DNA, 25 bp, Probe Sequence
ttagccaggcatggtggcacgcacc

SEQ ID NO: 313668 - DNA, 25 bp, Probe Sequence
ttcactgcagacagtggcaccccag

SEQ ID NO: 313669 - DNA, 25 bp, Probe Sequence
ttactgagacttcgaagacccagca

SEQ ID NO: 313670 - DNA, 25 bp, Probe Sequence
ttacggcaatatcatcaccacacgc

SEQ ID NO: 313671 - DNA, 25 bp, Probe Sequence
ttacgaccactggaagccagcaccc

SEQ ID NO: 313672 - DNA, 25 bp, Probe Sequence
ttacgaccactggaagccagcaccc

SEQ ID NO: 313673 - DNA, 25 bp, Probe Sequence
ttacgacggcagcagcagccgcagc

SEQ ID NO: 313674 - DNA, 25 bp, Probe Sequence
ttacaagccgcaaaggcagcaggct

SEQ ID NO: 313675 - DNA, 25 bp, Probe Sequence
ttaccagctcatgaagacagccctc

SEQ ID NO: 313676 - DNA, 25 bp, Probe Sequence
ttaatgcagcctgcaaatccccaag

SEQ ID NO: 313677 - DNA, 25 bp, Probe Sequence
ttaagcaaatacttaagtccaagca

SEQ ID NO: 313678 - DNA, 25 bp, Probe Sequence
ttacctcatatactgtacattccaa

SEQ ID NO: 313679 - DNA, 25 bp, Probe Sequence
ttacctcatatatcccagacctgaa

SEQ ID NO: 313680 - DNA, 25 bp, Probe Sequence
ttaccatttaattacaatctcataa

SEQ ID NO: 313681 - DNA, 25 bp, Probe Sequence
ttaccttagttaacaagctgaatat

SEQ ID NO: 313682 - DNA, 25 bp, Probe Sequence
ttacactttttgactaactagcatc

SEQ ID NO: 313683 - DNA, 25 bp, Probe Sequence
ttacaattgtttatacactgttctc

SEQ ID NO: 313684 - DNA, 25 bp, Probe Sequence
ttaaattttgtgatatgcctgtttt

SEQ ID NO: 313685 - DNA, 25 bp, Probe Sequence
ttaacagtttgaaagagggttgctt

SEQ ID NO: 313686 - DNA, 25 bp, Probe Sequence
ttaacagttcaaaactgttttctgt

SEQ ID NO: 313687 - DNA, 25 bp, Probe Sequence
ttacacctaacatacttttcttgat

SEQ ID NO: 313688 - DNA, 25 bp, Probe Sequence
ttaacctaactcgcattgatgtatt

SEQ ID NO: 313689 - DNA, 25 bp, Probe Sequence
ttaacctaatatcacttaaatcgag

SEQ ID NO: 313690 - DNA, 25 bp, Probe Sequence
ttaaggtcaatatactgtacatttg

SEQ ID NO: 313691 - DNA, 25 bp, Probe Sequence
ttaagagccacaaaattgtatcact

SEQ ID NO: 313692 - DNA, 25 bp, Probe Sequence
ttcaagacctcgtcttatttcctcc

SEQ ID NO: 313693 - DNA, 25 bp, Probe Sequence
ttaagtgcctcctttaattcctaag

SEQ ID NO: 313694 - DNA, 25 bp, Probe Sequence
ttaaccagcccagtatgacttccaa

SEQ ID NO: 313695 - DNA, 25 bp, Probe Sequence
ttactccagcctactttatacacaa

SEQ ID NO: 313696 - DNA, 25 bp, Probe Sequence
ttacccacactacttctacagatga

SEQ ID NO: 313697 - DNA, 25 bp, Probe Sequence
ttccaccagacgtctcctaagacag

SEQ ID NO: 313698 - DNA, 25 bp, Probe Sequence
ttgggccaacagttgcctaggcttg

SEQ ID NO: 313699 - DNA, 25 bp, Probe Sequence
ttaaccaccaatgcgctggacttga

SEQ ID NO: 313700 - DNA, 25 bp, Probe Sequence
ttacccacaaatacctgatcacctg

SEQ ID NO: 313701 - DNA, 25 bp, Probe Sequence
ttagccccaagatgcgtgtatctct

SEQ ID NO: 313702 - DNA, 25 bp, Probe Sequence
ttaccctactgatgatgtgttgttg

SEQ ID NO: 313703 - DNA, 25 bp, Probe Sequence
ttacccagatataggtgcgttcttt

SEQ ID NO: 313704 - DNA, 25 bp, Probe Sequence
ttactcctgtagaagtctttgcttt

SEQ ID NO: 313705 - DNA, 25 bp, Probe Sequence
ttactggctgtgtgaactttttgta

SEQ ID NO: 313706 - DNA, 25 bp, Probe Sequence
ttactgactgcttatgtatcttgtt

SEQ ID NO: 313707 - DNA, 25 bp, Probe Sequence
ttactattgtataccagcttaattg

SEQ ID NO: 313708 - DNA, 25 bp, Probe Sequence
ttacttttttcaggcttactctaag

SEQ ID NO: 313709 - DNA, 25 bp, Probe Sequence
ttacctttgtgtgtctttcctgaag

SEQ ID NO: 313710 - DNA, 25 bp, Probe Sequence
ttcaccgtttggctcgatattataa

SEQ ID NO: 313711 - DNA, 25 bp, Probe Sequence
ttacacgttttgcccaataaataat

SEQ ID NO: 313712 - DNA, 25 bp, Probe Sequence
ttaacattgttgggccatttaaaat

SEQ ID NO: 313713 - DNA, 25 bp, Probe Sequence
ttcaacatcttagctgtcagtaaaa

SEQ ID NO: 313714 - DNA, 25 bp, Probe Sequence
ttaacacgcttagtgtctctaaaaa

SEQ ID NO: 313715 - DNA, 25 bp, Probe Sequence
ttaacctgtgtgctgtacttttaca

SEQ ID NO: 313716 - DNA, 25 bp, Probe Sequence
ttaacaaggcttgaatctgtattac

SEQ ID NO: 313717 - DNA, 25 bp, Probe Sequence
ttacaagggcctgcatcatctttgg

SEQ ID NO: 313718 - DNA, 25 bp, Probe Sequence
ttcatacagggcagccacaccttgt

SEQ ID NO: 313719 - DNA, 25 bp, Probe Sequence
ttaatggggctggtgcccactttcc

SEQ ID NO: 313720 - DNA, 25 bp, Probe Sequence
ttaatggggctggtgcccactttcc

SEQ ID NO: 313721 - DNA, 25 bp, Probe Sequence
ttaatgggcgcttgagtgcctcctt

SEQ ID NO: 313722 - DNA, 25 bp, Probe Sequence
ttaagcggcgtggagatgcggcagc

SEQ ID NO: 313723 - DNA, 25 bp, Probe Sequence
ttaccagtgtgtgcaatcgccatgt

SEQ ID NO: 313724 - DNA, 25 bp, Probe Sequence
ttaccagtggctgaatctactttct

SEQ ID NO: 313725 - DNA, 25 bp, Probe Sequence
ttagccaggtgtggtagctcacacc

SEQ ID NO: 313726 - DNA, 25 bp, Probe Sequence
ttagccgggatggtcttgatctcct

SEQ ID NO: 313727 - DNA, 25 bp, Probe Sequence
ttagccaggacaacactctgtctcc

SEQ ID NO: 313728 - DNA, 25 bp, Probe Sequence
ttagcctgtgactctgtgatgtatc

SEQ ID NO: 313729 - DNA, 25 bp, Probe Sequence
ttacctgatgcctgctgctgaagag

SEQ ID NO: 313730 - DNA, 25 bp, Probe Sequence
ttacctagctaccactaggtggata

SEQ ID NO: 313731 - DNA, 25 bp, Probe Sequence
ttacctcgctgaccctatgaaggca

SEQ ID NO: 313732 - DNA, 25 bp, Probe Sequence
ttagccctgctaaactatgtacaga

SEQ ID NO: 313733 - DNA, 25 bp, Probe Sequence
ttgagcccttaaacatacatactat

SEQ ID NO: 313734 - DNA, 25 bp, Probe Sequence
ttcagccagcttaaacccatacaat

SEQ ID NO: 313735 - DNA, 25 bp, Probe Sequence
ttcagccagcttaaacccatacaat

SEQ ID NO: 313736 - DNA, 25 bp, Probe Sequence
ttctcacagttattaaccagactca

SEQ ID NO: 313737 - DNA, 25 bp, Probe Sequence
ttcacatctgtccttaatcggtcca

SEQ ID NO: 313738 - DNA, 25 bp, Probe Sequence
ttaatgctgatctactataaggtat

SEQ ID NO: 313739 - DNA, 25 bp, Probe Sequence
ttgaatgcaatatattacagagaga

SEQ ID NO: 313740 - DNA, 25 bp, Probe Sequence
ttaaccatgatgtcacttcaggtga

SEQ ID NO: 313741 - DNA, 25 bp, Probe Sequence
ttcagctacgagtcctcggcggaaa

SEQ ID NO: 313742 - DNA, 25 bp, Probe Sequence
ttaatagcgaggatcagtgaggaaa

SEQ ID NO: 313743 - DNA, 25 bp, Probe Sequence
ttaagccgaagaagcctgggaatca

SEQ ID NO: 313744 - DNA, 25 bp, Probe Sequence
ttaatacatgaacagcctttgccaa

SEQ ID NO: 313745 - DNA, 25 bp, Probe Sequence
ttaataaacagtacctgctctcaaa

SEQ ID NO: 313746 - DNA, 25 bp, Probe Sequence
ttaatgtaactgtacccttctgcat

SEQ ID NO: 313747 - DNA, 25 bp, Probe Sequence
ttaatgtaaactaacctcctgcatg

SEQ ID NO: 313748 - DNA, 25 bp, Probe Sequence
ttaatgctgtgaatctagccctcct

SEQ ID NO: 313749 - DNA, 25 bp, Probe Sequence
ttaatgatgatgactccgcaagccc

SEQ ID NO: 313750 - DNA, 25 bp, Probe Sequence
ttaattcagtgttcccatgagcgcc

SEQ ID NO: 313751 - DNA, 25 bp, Probe Sequence
ttaatccattcaactctgtgacaca

SEQ ID NO: 313752 - DNA, 25 bp, Probe Sequence
ttaagtctttacctggccacaaact

SEQ ID NO: 313753 - DNA, 25 bp, Probe Sequence
ttaagtcttaagtgatgccccttcc

SEQ ID NO: 313754 - DNA, 25 bp, Probe Sequence
ttaagccttatattaggcccctcta

SEQ ID NO: 313755 - DNA, 25 bp, Probe Sequence
ttaatattctgtttaggcccactaa

SEQ ID NO: 313756 - DNA, 25 bp, Probe Sequence
ttaatagtagatgtggttcccagaa

SEQ ID NO: 313757 - DNA, 25 bp, Probe Sequence
ttgcaaaaagtcctttagcccaaag

SEQ ID NO: 313758 - DNA, 25 bp, Probe Sequence
ttaaagcaattcctttgacctgtca

SEQ ID NO: 313759 - DNA, 25 bp, Probe Sequence
ttaacctatcctcaattcacatgtc

SEQ ID NO: 313760 - DNA, 25 bp, Probe Sequence
ttaagacatttctaaatggcacttc

SEQ ID NO: 313761 - DNA, 25 bp, Probe Sequence
ttacagtctttttctcaggagctac

SEQ ID NO: 313762 - DNA, 25 bp, Probe Sequence
ttacagcttgttttccaggcatcga

SEQ ID NO: 313763 - DNA, 25 bp, Probe Sequence
ttactgcttgtctctcaaggctgct

SEQ ID NO: 313764 - DNA, 25 bp, Probe Sequence
ttacatgtttttacagtggcctgct

SEQ ID NO: 313765 - DNA, 25 bp, Probe Sequence
ttaaggttttcttgagagcctgtag

SEQ ID NO: 313766 - DNA, 25 bp, Probe Sequence
ttaccgtatttccaacacacgatag

SEQ ID NO: 313767 - DNA, 25 bp, Probe Sequence
ttgccactttttctaaacgaagatt

SEQ ID NO: 313768 - DNA, 25 bp, Probe Sequence
ttctaccttttatataaccaataat

SEQ ID NO: 313769 - DNA, 25 bp, Probe Sequence
ttcaacctttaataattttgcaaag

SEQ ID NO: 313770 - DNA, 25 bp, Probe Sequence
ttaaccatgtttgacatattttaat

SEQ ID NO: 313771 - DNA, 25 bp, Probe Sequence
ttaaacaggtagcacaatctactaa

SEQ ID NO: 313772 - DNA, 25 bp, Probe Sequence
ttaccacaggtaaaatattatgtca

SEQ ID NO: 313773 - DNA, 25 bp, Probe Sequence
ttacacccctataagtagttatcac

SEQ ID NO: 313774 - DNA, 25 bp, Probe Sequence
ttaatcccgttatggactctgtctc

SEQ ID NO: 313775 - DNA, 25 bp, Probe Sequence
ttaagcccacatatcaggaccgagt

SEQ ID NO: 313776 - DNA, 25 bp, Probe Sequence
ttaacattcaaatcaggccagcgcg

SEQ ID NO: 313777 - DNA, 25 bp, Probe Sequence
ttcaaaataacatagttcatgctga

SEQ ID NO: 313778 - DNA, 25 bp, Probe Sequence
ttcaagaaaaaaagagctcactatc

SEQ ID NO: 313779 - DNA, 25 bp, Probe Sequence
ttaacacaaaagactgacccctcag

SEQ ID NO: 313780 - DNA, 25 bp, Probe Sequence
ttacacttgaacacagagcccctag

SEQ ID NO: 313781 - DNA, 25 bp, Probe Sequence
ttcgacgagaacatgaagcccctgg

SEQ ID NO: 313782 - DNA, 25 bp, Probe Sequence
ttcagacggcggaatgagtcccctg

SEQ ID NO: 313783 - DNA, 25 bp, Probe Sequence
ttcagggagggttagcctgcaccgc

SEQ ID NO: 313784 - DNA, 25 bp, Probe Sequence
ttgacggagagtgtggccatcctgc

SEQ ID NO: 313785 - DNA, 25 bp, Probe Sequence
ttacagtggttgatgccttacatga

SEQ ID NO: 313786 - DNA, 25 bp, Probe Sequence
ttacttgcctatctgacttcataca

SEQ ID NO: 313787 - DNA, 25 bp, Probe Sequence
ttactctatcttcagcctatcagga

SEQ ID NO: 313788 - DNA, 25 bp, Probe Sequence
ttacctatcttaaatctttctgagt

SEQ ID NO: 313789 - DNA, 25 bp, Probe Sequence
ttaccttttaagacattttcatgct

SEQ ID NO: 313790 - DNA, 25 bp, Probe Sequence
ttacctcttgtaaggcattccacag

SEQ ID NO: 313791 - DNA, 25 bp, Probe Sequence
ttaccggtgtaagctactgcatctg

SEQ ID NO: 313792 - DNA, 25 bp, Probe Sequence
ttaccatggtgatgcgtttggccag

SEQ ID NO: 313793 - DNA, 25 bp, Probe Sequence
ttaccatggtgatgcgttttggcag

SEQ ID NO: 313794 - DNA, 25 bp, Probe Sequence
ttaccattgtgatgcgttcttgcca

SEQ ID NO: 313795 - DNA, 25 bp, Probe Sequence
ttactctgttgctggctttagcaga

SEQ ID NO: 313796 - DNA, 25 bp, Probe Sequence
ttacttgtgagtctgcttctgcata

SEQ ID NO: 313797 - DNA, 25 bp, Probe Sequence
ttactatgtatcaggcatctgtgct

SEQ ID NO: 313798 - DNA, 25 bp, Probe Sequence
ttacgatgttatgagtctgattcag

SEQ ID NO: 313799 - DNA, 25 bp, Probe Sequence
ttacgtggttagtcatcgcgtagta

SEQ ID NO: 313800 - DNA, 25 bp, Probe Sequence
ttaccgtattagtatcgcctattac

SEQ ID NO: 313801 - DNA, 25 bp, Probe Sequence
ttacctaacaagtactgctcattta

SEQ ID NO: 313802 - DNA, 25 bp, Probe Sequence
ttcaccaagacctacactgttggct

SEQ ID NO: 313803 - DNA, 25 bp, Probe Sequence
ttcttcaagacctgagcctggagct

SEQ ID NO: 313804 - DNA, 25 bp, Probe Sequence
ttcacgaatggtttggcacaggagt

SEQ ID NO: 313805 - DNA, 25 bp, Probe Sequence
ttaagcaatagaaaggccatggaat

SEQ ID NO: 313806 - DNA, 25 bp, Probe Sequence
ttaaggatgaggtaggtaggcagga

SEQ ID NO: 313807 - DNA, 25 bp, Probe Sequence
ttaatgcctacctaagtgggataga

SEQ ID NO: 313808 - DNA, 25 bp, Probe Sequence
ttccagccttccttcctgggcatgg

SEQ ID NO: 313809 - DNA, 25 bp, Probe Sequence
ttacgcaatagcgacgcgctggcgt

SEQ ID NO: 313810 - DNA, 25 bp, Probe Sequence
ttaccatagatgtcaccgagtctgt

SEQ ID NO: 313811 - DNA, 25 bp, Probe Sequence
ttacctagatcagccatcagcctgt

SEQ ID NO: 313812 - DNA, 25 bp, Probe Sequence
ttacctagaccaaaagcctgcattt

SEQ ID NO: 313813 - DNA, 25 bp, Probe Sequence
ttactctacacttatatacctctct

SEQ ID NO: 313814 - DNA, 25 bp, Probe Sequence
ttactatgagctgtatataccatgt

SEQ ID NO: 313815 - DNA, 25 bp, Probe Sequence
ttgcagtgatgtccgtttgtccaga

SEQ ID NO: 313816 - DNA, 25 bp, Probe Sequence
ttcagtgaaacgggtgctggcaagc

SEQ ID NO: 313817 - DNA, 25 bp, Probe Sequence
ttaatgaaacgctgttcagaaacca

SEQ ID NO: 313818 - DNA, 25 bp, Probe Sequence
ttaacacaacagggtcctggccacc

SEQ ID NO: 313819 - DNA, 25 bp, Probe Sequence
ttcccgatccagagacaatggcccc

SEQ ID NO: 313820 - DNA, 25 bp, Probe Sequence
ttgaccatcatctgttacctgggcc

SEQ ID NO: 313821 - DNA, 25 bp, Probe Sequence
ttaccttcgaagaacttggagctct

SEQ ID NO: 313822 - DNA, 25 bp, Probe Sequence
ttaactctcccgaactagaacttga

SEQ ID NO: 313823 - DNA, 25 bp, Probe Sequence
ttaacttgccccaatgatagaaaag

SEQ ID NO: 313824 - DNA, 25 bp, Probe Sequence
ttcaaattcctccctgtacgaaagg

SEQ ID NO: 313825 - DNA, 25 bp, Probe Sequence
ttaccccagctaccgttaaatgagg

SEQ ID NO: 313826 - DNA, 25 bp, Probe Sequence
ttaccctccatggtcgttaaaggag

SEQ ID NO: 313827 - DNA, 25 bp, Probe Sequence
ttaaccctagcgatggcttgggaga

SEQ ID NO: 313828 - DNA, 25 bp, Probe Sequence
ttaactcctgggttgctgttgggta

SEQ ID NO: 313829 - DNA, 25 bp, Probe Sequence
ttaaccccattgtatgtttgtggaa

SEQ ID NO: 313830 - DNA, 25 bp, Probe Sequence
ttacccgccatacattaaggagcag

SEQ ID NO: 313831 - DNA, 25 bp, Probe Sequence
ttaaagaccataaatctaacagcaa

SEQ ID NO: 313832 - DNA, 25 bp, Probe Sequence
ttaagaactgcaaatactccaagga

SEQ ID NO: 313833 - DNA, 25 bp, Probe Sequence
ttaaatattgccaaacgacacagga

SEQ ID NO: 313834 - DNA, 25 bp, Probe Sequence
ttaactacatccgcactgacgagga

SEQ ID NO: 313835 - DNA, 25 bp, Probe Sequence
ttaaggacaccatagctgccaacag

SEQ ID NO: 313836 - DNA, 25 bp, Probe Sequence
ttaaggacaccatagctgccaacag

SEQ ID NO: 313837 - DNA, 25 bp, Probe Sequence
ttaataaccaagttgctgctgaact

SEQ ID NO: 313838 - DNA, 25 bp, Probe Sequence
ttaaaacatcaaactcatgggagat

SEQ ID NO: 313839 - DNA, 25 bp, Probe Sequence
ttaaacagtataaaatgcgtgaacc

SEQ ID NO: 313840 - DNA, 25 bp, Probe Sequence
ttcacaaggtacaaaatcttgcata

SEQ ID NO: 313841 - DNA, 25 bp, Probe Sequence
ttacagggtgactcacagccgcatt

SEQ ID NO: 313842 - DNA, 25 bp, Probe Sequence
ttacttttgcaaagccatctccttc

SEQ ID NO: 313843 - DNA, 25 bp, Probe Sequence
ttacatttgagaagcccttgcctgg

SEQ ID NO: 313844 - DNA, 25 bp, Probe Sequence
ttacatggtgaaaccccatctctac

SEQ ID NO: 313845 - DNA, 25 bp, Probe Sequence
ttcagaggtgacaatttagcattta

SEQ ID NO: 313846 - DNA, 25 bp, Probe Sequence
ttaagtgtgaagctttgcatcaaga

SEQ ID NO: 313847 - DNA, 25 bp, Probe Sequence
ttaatgttgacatctgctccaaagc

SEQ ID NO: 313848 - DNA, 25 bp, Probe Sequence
ttacattctgtttactgccacaagc

SEQ ID NO: 313849 - DNA, 25 bp, Probe Sequence
ttacatagtatttgacactcatgca

SEQ ID NO: 313850 - DNA, 25 bp, Probe Sequence
ttacatcgctgttggatccatctcc

SEQ ID NO: 313851 - DNA, 25 bp, Probe Sequence
ttactctgaagggcatcatgcatct

SEQ ID NO: 313852 - DNA, 25 bp, Probe Sequence
ttactctgaacaatgacatcatgct

SEQ ID NO: 313853 - DNA, 25 bp, Probe Sequence
ttactctagtccaagccatcattac

SEQ ID NO: 313854 - DNA, 25 bp, Probe Sequence
ttactgaagagcaatagccacttga

SEQ ID NO: 313855 - DNA, 25 bp, Probe Sequence
ttacttcatgcgcaatgctgacttg

SEQ ID NO: 313856 - DNA, 25 bp, Probe Sequence
ttacctgctggatattggctgtggc

SEQ ID NO: 313857 - DNA, 25 bp, Probe Sequence
ttaactctgtaattgtggtgtgtca

SEQ ID NO: 313858 - DNA, 25 bp, Probe Sequence
ttaacctgcatgttctggttgtctg

SEQ ID NO: 313859 - DNA, 25 bp, Probe Sequence
ttacccatggtgatgcgttttgcag

SEQ ID NO: 313860 - DNA, 25 bp, Probe Sequence
ttaacctctctgaatggcattttac

SEQ ID NO: 313861 - DNA, 25 bp, Probe Sequence
ttcaaagctcgtctgcgctttctaa

SEQ ID NO: 313862 - DNA, 25 bp, Probe Sequence
ttctaacataatctgcagttgtctg

SEQ ID NO: 313863 - DNA, 25 bp, Probe Sequence
ttctcaatcatctgtgggtcatttg

SEQ ID NO: 313864 - DNA, 25 bp, Probe Sequence
ttctcaactgcatctacttcaaagg

SEQ ID NO: 313865 - DNA, 25 bp, Probe Sequence
ttaaatgcagcatccacttcataat

SEQ ID NO: 313866 - DNA, 25 bp, Probe Sequence
ttacagacctatccaagctcaagtg

SEQ ID NO: 313867 - DNA, 25 bp, Probe Sequence
ttacaactctgctctacttagcctt

SEQ ID NO: 313868 - DNA, 25 bp, Probe Sequence
ttacaccctttttcatcttgacatt

SEQ ID NO: 313869 - DNA, 25 bp, Probe Sequence
ttaatcccatacaccatcttgacta

SEQ ID NO: 313870 - DNA, 25 bp, Probe Sequence
ttaagccctggcagcattttggtcc

SEQ ID NO: 313871 - DNA, 25 bp, Probe Sequence
ttaaccctcagaggccttcaagtcc

SEQ ID NO: 313872 - DNA, 25 bp, Probe Sequence
ttaacatttcaagactacagaacat

SEQ ID NO: 313873 - DNA, 25 bp, Probe Sequence
ttacctgtacactgacttgagacca

SEQ ID NO: 313874 - DNA, 25 bp, Probe Sequence
ttacctgtacactgacttgagacca

SEQ ID NO: 313875 - DNA, 25 bp, Probe Sequence
ttacctgtacactgacttgagacca

SEQ ID NO: 313876 - DNA, 25 bp, Probe Sequence
ttcaccgtggctcagaatgagagat

SEQ ID NO: 313877 - DNA, 25 bp, Probe Sequence
ttcatccgggatggaagctgctgga

SEQ ID NO: 313878 - DNA, 25 bp, Probe Sequence
ttaagcagactggctgaagctttgc

SEQ ID NO: 313879 - DNA, 25 bp, Probe Sequence
ttaatggtcatgctgccgcaggatg

SEQ ID NO: 313880 - DNA, 25 bp, Probe Sequence
ttaatggcatggactctggagaatc

SEQ ID NO: 313881 - DNA, 25 bp, Probe Sequence
ttacattcccaccaagagcatacga

SEQ ID NO: 313882 - DNA, 25 bp, Probe Sequence
ttacatcccacagaggaaacagaat

SEQ ID NO: 313883 - DNA, 25 bp, Probe Sequence
ttacatccccaatcagaggcatcaa

SEQ ID NO: 313884 - DNA, 25 bp, Probe Sequence
ttacagatcccgacgcagaacacac

SEQ ID NO: 313885 - DNA, 25 bp, Probe Sequence
ttaatgggccagagccatgaccctc

SEQ ID NO: 313886 - DNA, 25 bp, Probe Sequence
ttgggcggccagaagtgagaccccc

SEQ ID NO: 313887 - DNA, 25 bp, Probe Sequence
ttcggggacaatctggtcacccgct

SEQ ID NO: 313888 - DNA, 25 bp, Probe Sequence
ttccgggaaaggatggatcctcggg

SEQ ID NO: 313889 - DNA, 25 bp, Probe Sequence
ttccggggagtgcatcggtacttga

SEQ ID NO: 313890 - DNA, 25 bp, Probe Sequence
ttccatggggtcacaaggtacctaa

SEQ ID NO: 313891 - DNA, 25 bp, Probe Sequence
ttactcgggatttctacagctacct

SEQ ID NO: 313892 - DNA, 25 bp, Probe Sequence
ttacatccaggcagtctctagctac

SEQ ID NO: 313893 - DNA, 25 bp, Probe Sequence
ttacccacatgacttattatgcata

SEQ ID NO: 313894 - DNA, 25 bp, Probe Sequence
ttacccacatgacttattatgcata

SEQ ID NO: 313895 - DNA, 25 bp, Probe Sequence
ttactgcccaggcctatctggaagc

SEQ ID NO: 313896 - DNA, 25 bp, Probe Sequence
ttaagctgccaacctttggcggggg

SEQ ID NO: 313897 - DNA, 25 bp, Probe Sequence
ttaatgctgcgcttcgcttggtgag

SEQ ID NO: 313898 - DNA, 25 bp, Probe Sequence
ttcaatgcctgtccgatttggctgg

SEQ ID NO: 313899 - DNA, 25 bp, Probe Sequence
ttcagaggcttggtgttcagggccc

SEQ ID NO: 313900 - DNA, 25 bp, Probe Sequence
ttaaggctgtagcttgccgatgctc

SEQ ID NO: 313901 - DNA, 25 bp, Probe Sequence
ttaaactgtgtgttctccatggtca

SEQ ID NO: 313902 - DNA, 25 bp, Probe Sequence
ttaaaatgtggtatgctcttgagat

SEQ ID NO: 313903 - DNA, 25 bp, Probe Sequence
ttaaatactgtggttgcctctatgt

SEQ ID NO: 313904 - DNA, 25 bp, Probe Sequence
ttaattacattgggagcagttcatg

SEQ ID NO: 313905 - DNA, 25 bp, Probe Sequence
ttacttaagctcctgacactctatc

SEQ ID NO: 313906 - DNA, 25 bp, Probe Sequence
ttacattcatgaccttgacacctca

SEQ ID NO: 313907 - DNA, 25 bp, Probe Sequence
ttacatttgccctaaccctagggat

SEQ ID NO: 313908 - DNA, 25 bp, Probe Sequence
ttaatttccagtcaccccaaatatg

SEQ ID NO: 313909 - DNA, 25 bp, Probe Sequence
ttcaagtttcagcaactacctacaa

SEQ ID NO: 313910 - DNA, 25 bp, Probe Sequence
ttaatgcatgttaggaaaatttcac

SEQ ID NO: 313911 - DNA, 25 bp, Probe Sequence
ttactggcttattgatcaacttata

SEQ ID NO: 313912 - DNA, 25 bp, Probe Sequence
ttcacttgctgtaaatctactacta

SEQ ID NO: 313913 - DNA, 25 bp, Probe Sequence
ttactttgttatttagtgacacatt

SEQ ID NO: 313914 - DNA, 25 bp, Probe Sequence
ttacttttattatttggatgtatat

SEQ ID NO: 313915 - DNA, 25 bp, Probe Sequence
ttacgtcttatacatcttagttaca

SEQ ID NO: 313916 - DNA, 25 bp, Probe Sequence
ttacgttattaatttccaattccat

SEQ ID NO: 313917 - DNA, 25 bp, Probe Sequence
ttccggccaattttggaaattccat

SEQ ID NO: 313918 - DNA, 25 bp, Probe Sequence
ttctctggcctttaaggtcaaacac

SEQ ID NO: 313919 - DNA, 25 bp, Probe Sequence
ttctcacccagtaacggttaactct

SEQ ID NO: 313920 - DNA, 25 bp, Probe Sequence
ttcaacccgtaactactactaatca

SEQ ID NO: 313921 - DNA, 25 bp, Probe Sequence
ttcagtccctgtatggagacccaaa

SEQ ID NO: 313922 - DNA, 25 bp, Probe Sequence
ttaaccgtgattggagataccacaa

SEQ ID NO: 313923 - DNA, 25 bp, Probe Sequence
ttcaagcttgtctcgcagaaaccca

SEQ ID NO: 313924 - DNA, 25 bp, Probe Sequence
ttaagctttaaatggatgtcctcaa

SEQ ID NO: 313925 - DNA, 25 bp, Probe Sequence
ttaagtgtttaagtgttattctgaa

SEQ ID NO: 313926 - DNA, 25 bp, Probe Sequence
ttaagtttaattcttcatagctgaa

SEQ ID NO: 313927 - DNA, 25 bp, Probe Sequence
ttaaattctgaactgtatccatatt

SEQ ID NO: 313928 - DNA, 25 bp, Probe Sequence
ttcaaattgctaaggccccactggt

SEQ ID NO: 313929 - DNA, 25 bp, Probe Sequence
ttaatatttcagtgccccttgcaga

SEQ ID NO: 313930 - DNA, 25 bp, Probe Sequence
ttacattgattccttccgctttgga

SEQ ID NO: 313931 - DNA, 25 bp, Probe Sequence
ttaatttctcgcagtcttcctggaa

SEQ ID NO: 313932 - DNA, 25 bp, Probe Sequence
ttactttctcaaattcttgccatga

SEQ ID NO: 313933 - DNA, 25 bp, Probe Sequence
ttactgtgttagagtccatccagac

SEQ ID NO: 313934 - DNA, 25 bp, Probe Sequence
ttaattcttcgacaactccagaccg

SEQ ID NO: 313935 - DNA, 25 bp, Probe Sequence
ttaattcttcgacaactccagaccg

SEQ ID NO: 313936 - DNA, 25 bp, Probe Sequence
ttaattcttattcaattccatgact

SEQ ID NO: 313937 - DNA, 25 bp, Probe Sequence
ttaatgccttaatagactactgaag

SEQ ID NO: 313938 - DNA, 25 bp, Probe Sequence
ttcaatgccctaatcaaaaaatgta

SEQ ID NO: 313939 - DNA, 25 bp, Probe Sequence
ttacagccatcaaacacataaacat

SEQ ID NO: 313940 - DNA, 25 bp, Probe Sequence
ttacagatacagatgttcaagacat

SEQ ID NO: 313941 - DNA, 25 bp, Probe Sequence
ttaatatacaggcttagtcagctgc

SEQ ID NO: 313942 - DNA, 25 bp, Probe Sequence
ttaaagcctggacttggatcgcatc

SEQ ID NO: 313943 - DNA, 25 bp, Probe Sequence
ttaaaatgtgtacgtgggccagcat

SEQ ID NO: 313944 - DNA, 25 bp, Probe Sequence
ttacaacctgtacgctgtgtccaat

SEQ ID NO: 313945 - DNA, 25 bp, Probe Sequence
ttgacccctggaggttggctgcaat

SEQ ID NO: 313946 - DNA, 25 bp, Probe Sequence
ttgactccacggggattttccaagt

SEQ ID NO: 313947 - DNA, 25 bp, Probe Sequence
ttcactcccccaagtctttggaaat

SEQ ID NO: 313948 - DNA, 25 bp, Probe Sequence
ttcactgtcctggcttttatttaaa

SEQ ID NO: 313949 - DNA, 25 bp, Probe Sequence
ttcacggccatagcttccaatacaa

SEQ ID NO: 313950 - DNA, 25 bp, Probe Sequence
ttacttcaatgggctcttccaacaa

SEQ ID NO: 313951 - DNA, 25 bp, Probe Sequence
ttacagtcaatgggccgtggaaaag

SEQ ID NO: 313952 - DNA, 25 bp, Probe Sequence
ttacagtatatggattctatgaaaa

SEQ ID NO: 313953 - DNA, 25 bp, Probe Sequence
ttacatgttcatctcttgccaaata

SEQ ID NO: 313954 - DNA, 25 bp, Probe Sequence
ttactggtgcatctcttgctgatat

SEQ ID NO: 313955 - DNA, 25 bp, Probe Sequence
ttcagctgcggcaacctggtgtata

SEQ ID NO: 313956 - DNA, 25 bp, Probe Sequence
ttcagacgagtgtcgctgcgtgagt

SEQ ID NO: 313957 - DNA, 25 bp, Probe Sequence
ttcaattaatgctgcgcttcgcttg

SEQ ID NO: 313958 - DNA, 25 bp, Probe Sequence
ttcatttcacagtcttctattgttg

SEQ ID NO: 313959 - DNA, 25 bp, Probe Sequence
ttcatgtatccctgttactgatagg

SEQ ID NO: 313960 - DNA, 25 bp, Probe Sequence
ttcttatccctgctaataaaggaaa

SEQ ID NO: 313961 - DNA, 25 bp, Probe Sequence
ttcaaaccttactatacacaagaga

SEQ ID NO: 313962 - DNA, 25 bp, Probe Sequence
ttaaattctgtagcacactgaggaa

SEQ ID NO: 313963 - DNA, 25 bp, Probe Sequence
ttcaggcttgtgtacccaatgggca

SEQ ID NO: 313964 - DNA, 25 bp, Probe Sequence
ttcaagtctgactacccatcaggca

SEQ ID NO: 313965 - DNA, 25 bp, Probe Sequence
ttgaaactgacctgccatgagattc

SEQ ID NO: 313966 - DNA, 25 bp, Probe Sequence
ttctgaacttcgtgccatattttgt

SEQ ID NO: 313967 - DNA, 25 bp, Probe Sequence
ttcaaacccggagctcatttttaag

SEQ ID NO: 313968 - DNA, 25 bp, Probe Sequence
ttcagcacacacaggaactctttcc

SEQ ID NO: 313969 - DNA, 25 bp, Probe Sequence
ttcaccctgatctgatagttttcct

SEQ ID NO: 313970 - DNA, 25 bp, Probe Sequence
ttcgtactgcactttgtttttccaa

SEQ ID NO: 313971 - DNA, 25 bp, Probe Sequence
ttcaacattgtcattttttcttaga

SEQ ID NO: 313972 - DNA, 25 bp, Probe Sequence
ttcaacattgtcattttttcttaga

SEQ ID NO: 313973 - DNA, 25 bp, Probe Sequence
ttaacatgatgtccttcagttccat

SEQ ID NO: 313974 - DNA, 25 bp, Probe Sequence
ttaaatgtgatagtctcagaaacat

SEQ ID NO: 313975 - DNA, 25 bp, Probe Sequence
ttactagtgaattccacaaacattt

SEQ ID NO: 313976 - DNA, 25 bp, Probe Sequence
ttcacggtgatattccacaagattt

SEQ ID NO: 313977 - DNA, 25 bp, Probe Sequence
ttaagcctgtttcctatagtttctg

SEQ ID NO: 313978 - DNA, 25 bp, Probe Sequence
ttcacaccttttccttattttattg

SEQ ID NO: 313979 - DNA, 25 bp, Probe Sequence
ttacactgctacaccattactttct

SEQ ID NO: 313980 - DNA, 25 bp, Probe Sequence
ttactcatgtgccttcaattttggt

SEQ ID NO: 313981 - DNA, 25 bp, Probe Sequence
ttaatcatggccaacaggttttgtt

SEQ ID NO: 313982 - DNA, 25 bp, Probe Sequence
ttcagaaggtatcaggtgtcattga

SEQ ID NO: 313983 - DNA, 25 bp, Probe Sequence
ttaaaggtgtgaagcaatggcattc

SEQ ID NO: 313984 - DNA, 25 bp, Probe Sequence
ttaaaggctgtgttgctatggcacc

SEQ ID NO: 313985 - DNA, 25 bp, Probe Sequence
ttaagggcattttctttgattctca

SEQ ID NO: 313986 - DNA, 25 bp, Probe Sequence
ttacagcaactttctctttattctc

SEQ ID NO: 313987 - DNA, 25 bp, Probe Sequence
ttaacacctgttgcatttatattct

SEQ ID NO: 313988 - DNA, 25 bp, Probe Sequence
ttaaatcagttctcaatttcatttt

SEQ ID NO: 313989 - DNA, 25 bp, Probe Sequence
ttaagaaatgtctgtattgtatttg

SEQ ID NO: 313990 - DNA, 25 bp, Probe Sequence
ttaagcaatttctagttattattct

SEQ ID NO: 313991 - DNA, 25 bp, Probe Sequence
ttaagagatttctgacatttattct

SEQ ID NO: 313992 - DNA, 25 bp, Probe Sequence
ttcagggtttatggatttgtattca

SEQ ID NO: 313993 - DNA, 25 bp, Probe Sequence
ttcagggctgtctacaacagtttta

SEQ ID NO: 313994 - DNA, 25 bp, Probe Sequence
ttcacggtgtgataatactctttag

SEQ ID NO: 313995 - DNA, 25 bp, Probe Sequence
ttcgcggtacagataacctgatcta

SEQ ID NO: 313996 - DNA, 25 bp, Probe Sequence
ttcactgggaacaacacagccgtcc

SEQ ID NO: 313997 - DNA, 25 bp, Probe Sequence
ttccctggaacataccaaaccctag

SEQ ID NO: 313998 - DNA, 25 bp, Probe Sequence
ttcccgagaataccctaagaccaat

SEQ ID NO: 313999 - DNA, 25 bp, Probe Sequence
ttccctggtaacaacttagtaagtg

SEQ ID NO: 314000 - DNA, 25 bp, Probe Sequence
ttaactgagtagccacaattagtaa

SEQ ID NO: 314001 - DNA, 25 bp, Probe Sequence
ttcactttgctacaccattaagaat

SEQ ID NO: 314002 - DNA, 25 bp, Probe Sequence
ttactacttgactctttacagaata

SEQ ID NO: 314003 - DNA, 25 bp, Probe Sequence
ttaagtcttgactctttcaaatgca

SEQ ID NO: 314004 - DNA, 25 bp, Probe Sequence
ttaaggaatatctcttgatatagaa

SEQ ID NO: 314005 - DNA, 25 bp, Probe Sequence
ttcaaggcttttgctggaaacagca

SEQ ID NO: 314006 - DNA, 25 bp, Probe Sequence
ttcaaggcattatctcctggggcca

SEQ ID NO: 314007 - DNA, 25 bp, Probe Sequence
ttaagtttatgtacctaggaccatc

SEQ ID NO: 314008 - DNA, 25 bp, Probe Sequence
ttaactctttgaaactgtatcacct

SEQ ID NO: 314009 - DNA, 25 bp, Probe Sequence
ttaacttctcagaaactgttaccat

SEQ ID NO: 314010 - DNA, 25 bp, Probe Sequence
ttaactatccagtcaactttcagct

SEQ ID NO: 314011 - DNA, 25 bp, Probe Sequence
ttaaccatccttaaattattgctta

SEQ ID NO: 314012 - DNA, 25 bp, Probe Sequence
ttacatatacccaaaattaacttat

SEQ ID NO: 314013 - DNA, 25 bp, Probe Sequence
ttaattgtacctgaatcaacctttc

SEQ ID NO: 314014 - DNA, 25 bp, Probe Sequence
ttaatcttttgtcaacttcctgatt

SEQ ID NO: 314015 - DNA, 25 bp, Probe Sequence
ttaacattttagtcactcttcctcc

SEQ ID NO: 314016 - DNA, 25 bp, Probe Sequence
ttaatctcaattagtctttctcccc

SEQ ID NO: 314017 - DNA, 25 bp, Probe Sequence
ttcaaacgctgtgtccattctcagc

SEQ ID NO: 314018 - DNA, 25 bp, Probe Sequence
ttcaacactggggactgcttcatcc

SEQ ID NO: 314019 - DNA, 25 bp, Probe Sequence
ttaacatcgtggtgctgcttcaccc

SEQ ID NO: 314020 - DNA, 25 bp, Probe Sequence
ttctcaagggagtgtgtttccagca

SEQ ID NO: 314021 - DNA, 25 bp, Probe Sequence
ttctaacgtgtgagatgtcccgaga

SEQ ID NO: 314022 - DNA, 25 bp, Probe Sequence
ttcatttccgtgaagggcaccgaga

SEQ ID NO: 314023 - DNA, 25 bp, Probe Sequence
ttcatattacgggcgggatcggagc

SEQ ID NO: 314024 - DNA, 25 bp, Probe Sequence
ttcaattctaggccaggaacggtgg

SEQ ID NO: 314025 - DNA, 25 bp, Probe Sequence
ttcaagtaagcggcaacaagggtcc

SEQ ID NO: 314026 - DNA, 25 bp, Probe Sequence
ttcaaggcctgggctacactgtggt

SEQ ID NO: 314027 - DNA, 25 bp, Probe Sequence
ttcaaggaccaattacctgctgatg

SEQ ID NO: 314028 - DNA, 25 bp, Probe Sequence
ttcaaaaccaataagccttgccaac

SEQ ID NO: 314029 - DNA, 25 bp, Probe Sequence
ttctaaccctttgctgtacacaagc

SEQ ID NO: 314030 - DNA, 25 bp, Probe Sequence
ttaacccctcttcctttgagagagc

SEQ ID NO: 314031 - DNA, 25 bp, Probe Sequence
ttcaaccggcttactcttagcagga

SEQ ID NO: 314032 - DNA, 25 bp, Probe Sequence
ttacactgggcttccgttacaagat

SEQ ID NO: 314033 - DNA, 25 bp, Probe Sequence
ttacactgtccaaaggtctcaccca

SEQ ID NO: 314034 - DNA, 25 bp, Probe Sequence
ttaacttctgcagagtttgccccag

SEQ ID NO: 314035 - DNA, 25 bp, Probe Sequence
ttaacctctctaagtttgcttgcct

SEQ ID NO: 314036 - DNA, 25 bp, Probe Sequence
ttcaacgcttaaaggtgtcttcctc

SEQ ID NO: 314037 - DNA, 25 bp, Probe Sequence
ttctactttaacagggtatgctgcc

SEQ ID NO: 314038 - DNA, 25 bp, Probe Sequence
ttaactttaactatgcctatcgccc

SEQ ID NO: 314039 - DNA, 25 bp, Probe Sequence
ttccacttaaactctgaaacaggca

SEQ ID NO: 314040 - DNA, 25 bp, Probe Sequence
ttccactaaaacatcttgcagacag

SEQ ID NO: 314041 - DNA, 25 bp, Probe Sequence
ttaatctacatatcttcccacagca

SEQ ID NO: 314042 - DNA, 25 bp, Probe Sequence
ttaatcgaattacagctgctagcca

SEQ ID NO: 314043 - DNA, 25 bp, Probe Sequence
ttacattgacaatccagtgggcaca

SEQ ID NO: 314044 - DNA, 25 bp, Probe Sequence
ttacatgatgcaaaatccagttgta

SEQ ID NO: 314045 - DNA, 25 bp, Probe Sequence
ttacagagcagggtcacttgatttg

SEQ ID NO: 314046 - DNA, 25 bp, Probe Sequence
ttaaggcatgaggctccttctgtct

SEQ ID NO: 314047 - DNA, 25 bp, Probe Sequence
ttcaaggaggccttccagctgtttg

SEQ ID NO: 314048 - DNA, 25 bp, Probe Sequence
ttcaagcgtggtctgccactgtttc

SEQ ID NO: 314049 - DNA, 25 bp, Probe Sequence
ttcaaccataggtcatcccttacta

SEQ ID NO: 314050 - DNA, 25 bp, Probe Sequence
ttaactcatatgatctcccttcagc

SEQ ID NO: 314051 - DNA, 25 bp, Probe Sequence
ttaactcatatgatctcccttcagc

SEQ ID NO: 314052 - DNA, 25 bp, Probe Sequence
ttaactcatatgatctcccttcagc

SEQ ID NO: 314053 - DNA, 25 bp, Probe Sequence
ttaacatcaattgtccacttggaga

SEQ ID NO: 314054 - DNA, 25 bp, Probe Sequence
ttaagcacttctgtcagtctttgaa

SEQ ID NO: 314055 - DNA, 25 bp, Probe Sequence
ttacatcacttctagctcactttta

SEQ ID NO: 314056 - DNA, 25 bp, Probe Sequence
ttacaacttcataatcacatgtcat

SEQ ID NO: 314057 - DNA, 25 bp, Probe Sequence
ttaagccagtcagttgcaatgtgca

SEQ ID NO: 314058 - DNA, 25 bp, Probe Sequence
ttaacccatgagctccatgtgcctt

SEQ ID NO: 314059 - DNA, 25 bp, Probe Sequence
ttaacccaaactcagtgcatttttt

SEQ ID NO: 314060 - DNA, 25 bp, Probe Sequence
ttaagacaaacccttgtgcaccttt

SEQ ID NO: 314061 - DNA, 25 bp, Probe Sequence
ttaaagcaaacccttgtcaagccta

SEQ ID NO: 314062 - DNA, 25 bp, Probe Sequence
ttctaggagaacccgcgtcatacct

SEQ ID NO: 314063 - DNA, 25 bp, Probe Sequence
ttctagctgagcaattccaccttaa

SEQ ID NO: 314064 - DNA, 25 bp, Probe Sequence
ttctggaggcaaatgggctgtctag

SEQ ID NO: 314065 - DNA, 25 bp, Probe Sequence
ttcttagaacttcagctgattgcag

SEQ ID NO: 314066 - DNA, 25 bp, Probe Sequence
ttcttagaacttcagctgattgcag

SEQ ID NO: 314067 - DNA, 25 bp, Probe Sequence
ttcttcgaacattccacatttgatg

SEQ ID NO: 314068 - DNA, 25 bp, Probe Sequence
ttggttctcacttccaacttaggac

SEQ ID NO: 314069 - DNA, 25 bp, Probe Sequence
ttggcttccctagaactgtgaagca

SEQ ID NO: 314070 - DNA, 25 bp, Probe Sequence
ttgacttcctaagctacttaagaca

SEQ ID NO: 314071 - DNA, 25 bp, Probe Sequence
ttactttgtaatcctatgcatttta

SEQ ID NO: 314072 - DNA, 25 bp, Probe Sequence
ttaactttgtatcctggcttataac

SEQ ID NO: 314073 - DNA, 25 bp, Probe Sequence
ttaacagggtatgctgcctctgtaa

SEQ ID NO: 314074 - DNA, 25 bp, Probe Sequence
ttaacaggtggtccgcaggcctgac

SEQ ID NO: 314075 - DNA, 25 bp, Probe Sequence
ttcaactggttttctgaccacgact

SEQ ID NO: 314076 - DNA, 25 bp, Probe Sequence
ttctcggttttataccaagcagcag

SEQ ID NO: 314077 - DNA, 25 bp, Probe Sequence
ttcacgttgattattcctcgacagg

SEQ ID NO: 314078 - DNA, 25 bp, Probe Sequence
ttcaagttagattttcctctggaga

SEQ ID NO: 314079 - DNA, 25 bp, Probe Sequence
ttaagtatagcttcctcccttgaaa

SEQ ID NO: 314080 - DNA, 25 bp, Probe Sequence
ttacagtgtacttggcattgcttta

SEQ ID NO: 314081 - DNA, 25 bp, Probe Sequence
ttacatgtttcactgtgttctatat

SEQ ID NO: 314082 - DNA, 25 bp, Probe Sequence
ttacagttatacaatgattttttaa

SEQ ID NO: 314083 - DNA, 25 bp, Probe Sequence
ttacagcagcgaagagatgattttt

SEQ ID NO: 314084 - DNA, 25 bp, Probe Sequence
ttcaaagctgaactgaatgagtttc

SEQ ID NO: 314085 - DNA, 25 bp, Probe Sequence
ttcaatagaaatcaaggtgttcaat

SEQ ID NO: 314086 - DNA, 25 bp, Probe Sequence
ttcttagtagagtcagggtttcacc

SEQ ID NO: 314087 - DNA, 25 bp, Probe Sequence
ttcattttatagtcagggttaactt

SEQ ID NO: 314088 - DNA, 25 bp, Probe Sequence
ttactttataacttagatgtctact

SEQ ID NO: 314089 - DNA, 25 bp, Probe Sequence
ttacattgtcttactctcttttact

SEQ ID NO: 314090 - DNA, 25 bp, Probe Sequence
ttacattcatcaatatccctcttgt

SEQ ID NO: 314091 - DNA, 25 bp, Probe Sequence
ttactatatctttctcagtgtctgt

SEQ ID NO: 314092 - DNA, 25 bp, Probe Sequence
ttacttatctgtatcggtcagggtc

SEQ ID NO: 314093 - DNA, 25 bp, Probe Sequence
ttcagcattactgtgtcgtctccgt

SEQ ID NO: 314094 - DNA, 25 bp, Probe Sequence
ttcagatgtgtctacgtgcgctctg

SEQ ID NO: 314095 - DNA, 25 bp, Probe Sequence
ttcagatgtgtctacgtgcgctctg

SEQ ID NO: 314096 - DNA, 25 bp, Probe Sequence
ttcagatgtgtctacgtgcgctctg

SEQ ID NO: 314097 - DNA, 25 bp, Probe Sequence
ttcagatgtgtctacgtgcgctctg

SEQ ID NO: 314098 - DNA, 25 bp, Probe Sequence
ttcagatgtgtctacgtgcgctctg

SEQ ID NO: 314099 - DNA, 25 bp, Probe Sequence
ttcatttggcttgtgtgcatctggc

SEQ ID NO: 314100 - DNA, 25 bp, Probe Sequence
ttcaaaagcttgtttcactgccttt

SEQ ID NO: 314101 - DNA, 25 bp, Probe Sequence
ttaagtcctgtctttacatcctttt

SEQ ID NO: 314102 - DNA, 25 bp, Probe Sequence
ttaattattgttatacacagcttta

SEQ ID NO: 314103 - DNA, 25 bp, Probe Sequence
ttaaaattgtccgttccatctgtga

SEQ ID NO: 314104 - DNA, 25 bp, Probe Sequence
ttaaaacctcagcatgtctccctga

SEQ ID NO: 314105 - DNA, 25 bp, Probe Sequence
ttaaaaccactgtcttgtcacctca

SEQ ID NO: 314106 - DNA, 25 bp, Probe Sequence
ttaaaaccactgtcttgtcacctca

SEQ ID NO: 314107 - DNA, 25 bp, Probe Sequence
ttaataatgctcttgtgtttaccta

SEQ ID NO: 314108 - DNA, 25 bp, Probe Sequence
ttaatatgtctcatgtctcgttcct

SEQ ID NO: 314109 - DNA, 25 bp, Probe Sequence
ttaatagtcatgcttcatctctaac

SEQ ID NO: 314110 - DNA, 25 bp, Probe Sequence
ttacacagactggcattctctctat

SEQ ID NO: 314111 - DNA, 25 bp, Probe Sequence
ttacaccctgtgttcatctgtgaca

SEQ ID NO: 314112 - DNA, 25 bp, Probe Sequence
ttcactgcagccctggatttgcata

SEQ ID NO: 314113 - DNA, 25 bp, Probe Sequence
ttcagccagtgctgttactgcattt

SEQ ID NO: 314114 - DNA, 25 bp, Probe Sequence
ttcatgccgccatgttcctgatatt

SEQ ID NO: 314115 - DNA, 25 bp, Probe Sequence
ttacaggcccaggactggagctttc

SEQ ID NO: 314116 - DNA, 25 bp, Probe Sequence
ttacaaacacatcacctgacgtctc

SEQ ID NO: 314117 - DNA, 25 bp, Probe Sequence
ttaaactcacatccatattacacct

SEQ ID NO: 314118 - DNA, 25 bp, Probe Sequence
ttaaagatgcaacctcaaacaccaa

SEQ ID NO: 314119 - DNA, 25 bp, Probe Sequence
ttaatgagctcaccctttaacacaa

SEQ ID NO: 314120 - DNA, 25 bp, Probe Sequence
ttacagtgtaccctttgaatgggaa

SEQ ID NO: 314121 - DNA, 25 bp, Probe Sequence
ttcactgtggacagtttgacatcga

SEQ ID NO: 314122 - DNA, 25 bp, Probe Sequence
ttcacttgggttacctgccttgaag

SEQ ID NO: 314123 - DNA, 25 bp, Probe Sequence
ttcacttcggggactgcagtttgag

SEQ ID NO: 314124 - DNA, 25 bp, Probe Sequence
ttcacctcaggtgttgtgtcctgtg

SEQ ID NO: 314125 - DNA, 25 bp, Probe Sequence
ttcacctcaggtgttgtgtcctgtg

SEQ ID NO: 314126 - DNA, 25 bp, Probe Sequence
ttcccgggatacaggccggatgcag

SEQ ID NO: 314127 - DNA, 25 bp, Probe Sequence
ttcccgggatcacaaactggtcaat

SEQ ID NO: 314128 - DNA, 25 bp, Probe Sequence
ttcctcacggtcacagaactagttt

SEQ ID NO: 314129 - DNA, 25 bp, Probe Sequence
ttacttgctttttgcaaagctaatt

SEQ ID NO: 314130 - DNA, 25 bp, Probe Sequence
ttacttgccttttcaagtgtgacaa

SEQ ID NO: 314131 - DNA, 25 bp, Probe Sequence
ttacttgaattgtgcaatttgtaga

SEQ ID NO: 314132 - DNA, 25 bp, Probe Sequence
ttacatggaattttattttctacaa

SEQ ID NO: 314133 - DNA, 25 bp, Probe Sequence
ttaagtagcttattgattgttcata

SEQ ID NO: 314134 - DNA, 25 bp, Probe Sequence
ttaaatgagtacttgattcttcaga

SEQ ID NO: 314135 - DNA, 25 bp, Probe Sequence
ttaaaaatcacattctctgttcagc

SEQ ID NO: 314136 - DNA, 25 bp, Probe Sequence
ttacaaactaaatcagtgtgctgct

SEQ ID NO: 314137 - DNA, 25 bp, Probe Sequence
ttaaaaccaacatgcattgcctttc

SEQ ID NO: 314138 - DNA, 25 bp, Probe Sequence
ttcaagaactgcaccgttggtcctc

SEQ ID NO: 314139 - DNA, 25 bp, Probe Sequence
ttcaagaagcgtgcacctcgggcac

SEQ ID NO: 314140 - DNA, 25 bp, Probe Sequence
ttcagagaaagttagttcggctcga

SEQ ID NO: 314141 - DNA, 25 bp, Probe Sequence
ttcaaggaagaaccttctgccccag

SEQ ID NO: 314142 - DNA, 25 bp, Probe Sequence
ttcaaggaatgggtgcttcccttca

SEQ ID NO: 314143 - DNA, 25 bp, Probe Sequence
ttcagagcgaggcagtcttacagcg

SEQ ID NO: 314144 - DNA, 25 bp, Probe Sequence
ttgctgagtctgacagcctctgggc

SEQ ID NO: 314145 - DNA, 25 bp, Probe Sequence
ttcgatgccatcagcactctgaggg

SEQ ID NO: 314146 - DNA, 25 bp, Probe Sequence
ttcatcgccatcaagccggacggcg

SEQ ID NO: 314147 - DNA, 25 bp, Probe Sequence
ttcacagccatggagtagaggccta

SEQ ID NO: 314148 - DNA, 25 bp, Probe Sequence
ttcaagccatgccaggaatctgcct

SEQ ID NO: 314149 - DNA, 25 bp, Probe Sequence
ttcacgcacagcacgaatcgcatgt

SEQ ID NO: 314150 - DNA, 25 bp, Probe Sequence
ttcacacaatgccaagacttcgaaa

SEQ ID NO: 314151 - DNA, 25 bp, Probe Sequence
ttacagcacagccagacgttctaga

SEQ ID NO: 314152 - DNA, 25 bp, Probe Sequence
ttacactcatcaccactgtttgcta

SEQ ID NO: 314153 - DNA, 25 bp, Probe Sequence
ttacagctatggccactattattaa

SEQ ID NO: 314154 - DNA, 25 bp, Probe Sequence
ttcagactgagcgtgcctaccaaaa

SEQ ID NO: 314155 - DNA, 25 bp, Probe Sequence
ttcagactgagcgtgcctaccaaaa

SEQ ID NO: 314156 - DNA, 25 bp, Probe Sequence
ttcagactgagcgtgcctaccaaaa

SEQ ID NO: 314157 - DNA, 25 bp, Probe Sequence
ttctgatgtatgggtgctaaaaaaa

SEQ ID NO: 314158 - DNA, 25 bp, Probe Sequence
ttcaagctacatttggaaaatcaaa

SEQ ID NO: 314159 - DNA, 25 bp, Probe Sequence
ttcaggctattctgggtatgtaaaa

SEQ ID NO: 314160 - DNA, 25 bp, Probe Sequence
ttcaggtaatatatagccaattaaa

SEQ ID NO: 314161 - DNA, 25 bp, Probe Sequence
ttcacctgaacaagtagccgactca

SEQ ID NO: 314162 - DNA, 25 bp, Probe Sequence
ttacaccttctagtagctcaagcta

SEQ ID NO: 314163 - DNA, 25 bp, Probe Sequence
ttacactttgcttcaggctccagtg

SEQ ID NO: 314164 - DNA, 25 bp, Probe Sequence
ttcatgaccaagctgggctccattt

SEQ ID NO: 314165 - DNA, 25 bp, Probe Sequence
ttctagcccagttgggttttgattt

SEQ ID NO: 314166 - DNA, 25 bp, Probe Sequence
ttcaagcactccaggggttgtgggt

SEQ ID NO: 314167 - DNA, 25 bp, Probe Sequence
ttcttagtgcctgtgtggatttttg

SEQ ID NO: 314168 - DNA, 25 bp, Probe Sequence
ttctattctcccttgggttttatgg

SEQ ID NO: 314169 - DNA, 25 bp, Probe Sequence
ttcacactgccacctttggtatttg

SEQ ID NO: 314170 - DNA, 25 bp, Probe Sequence
ttacagcttctgatgttgaatgttc

SEQ ID NO: 314171 - DNA, 25 bp, Probe Sequence
ttacatcttttagtgcgtatgttct

SEQ ID NO: 314172 - DNA, 25 bp, Probe Sequence
ttacatgagttgaatctgtgttttt

SEQ ID NO: 314173 - DNA, 25 bp, Probe Sequence
ttaatagcatatcattctttttctt

SEQ ID NO: 314174 - DNA, 25 bp, Probe Sequence
ttaatactttatttgcattgtctca

SEQ ID NO: 314175 - DNA, 25 bp, Probe Sequence
ttaataacccagagcttgcctgcac

SEQ ID NO: 314176 - DNA, 25 bp, Probe Sequence
ttaattgagagccctgggtcctgcc

SEQ ID NO: 314177 - DNA, 25 bp, Probe Sequence
ttcaattgagacctttagctaactt

SEQ ID NO: 314178 - DNA, 25 bp, Probe Sequence
ttaaatgaccattttgagcagaagt

SEQ ID NO: 314179 - DNA, 25 bp, Probe Sequence
ttcaaatcctctttggatcgcaaat

SEQ ID NO: 314180 - DNA, 25 bp, Probe Sequence
ttcaaagtcttcatgccaggcaaaa

SEQ ID NO: 314181 - DNA, 25 bp, Probe Sequence
ttacaaatatgtatcctggattgag

SEQ ID NO: 314182 - DNA, 25 bp, Probe Sequence
ttaaacatgagggagcgtgggtagc

SEQ ID NO: 314183 - DNA, 25 bp, Probe Sequence
ttaatacatttggagctttgggagt

SEQ ID NO: 314184 - DNA, 25 bp, Probe Sequence
ttaaacattttgcatctctggacaa

SEQ ID NO: 314185 - DNA, 25 bp, Probe Sequence
ttaataatatctggtatcctggcac

SEQ ID NO: 314186 - DNA, 25 bp, Probe Sequence
ttaatatatatctgctgtccagaca

SEQ ID NO: 314187 - DNA, 25 bp, Probe Sequence
ttaatacagatgcagcttccctcac

SEQ ID NO: 314188 - DNA, 25 bp, Probe Sequence
ttaaacatgctcagcctgagccacc

SEQ ID NO: 314189 - DNA, 25 bp, Probe Sequence
ttcatcaagtctgtcatcggtcacc

SEQ ID NO: 314190 - DNA, 25 bp, Probe Sequence
ttcatcaagtctgtcatcggtcacc

SEQ ID NO: 314191 - DNA, 25 bp, Probe Sequence
ttcacatgagttagctctctagctc

SEQ ID NO: 314192 - DNA, 25 bp, Probe Sequence
ttcacatatgtgcagtgtcagcacc

SEQ ID NO: 314193 - DNA, 25 bp, Probe Sequence
ttacacatgcaggaatctccacaca

SEQ ID NO: 314194 - DNA, 25 bp, Probe Sequence
ttgagctcataggaacaggtagact

SEQ ID NO: 314195 - DNA, 25 bp, Probe Sequence
ttcagccatatcccaaggtagaaac

SEQ ID NO: 314196 - DNA, 25 bp, Probe Sequence
ttcaccttatctgagttagaaacta

SEQ ID NO: 314197 - DNA, 25 bp, Probe Sequence
ttaacttatgtggactgtaaatgtt

SEQ ID NO: 314198 - DNA, 25 bp, Probe Sequence
ttaaagctatggcatcatataattt

SEQ ID NO: 314199 - DNA, 25 bp, Probe Sequence
ttaacagcttgtagataattgtaat

SEQ ID NO: 314200 - DNA, 25 bp, Probe Sequence
ttaacatctcttaaacagtctctga

SEQ ID NO: 314201 - DNA, 25 bp, Probe Sequence
ttaatatctgttgttcagagctctg

SEQ ID NO: 314202 - DNA, 25 bp, Probe Sequence
ttacaacattgtttctcacacttgt

SEQ ID NO: 314203 - DNA, 25 bp, Probe Sequence
ttaaacattttcccactcattctga

SEQ ID NO: 314204 - DNA, 25 bp, Probe Sequence
ttaaacactatcttatcttctcctg

SEQ ID NO: 314205 - DNA, 25 bp, Probe Sequence
ttcaggcccttctgtgtgttgcctg

SEQ ID NO: 314206 - DNA, 25 bp, Probe Sequence
ttcaggctggttttggtttgtatta

SEQ ID NO: 314207 - DNA, 25 bp, Probe Sequence
ttcagactggtttctgttttttggt

SEQ ID NO: 314208 - DNA, 25 bp, Probe Sequence
ttcagttgtggacctgtccgtgggg

SEQ ID NO: 314209 - DNA, 25 bp, Probe Sequence
ttaatcttggtggattccgttggga

SEQ ID NO: 314210 - DNA, 25 bp, Probe Sequence
ttaattttgttaatcctgtctggga

SEQ ID NO: 314211 - DNA, 25 bp, Probe Sequence
ttaatttgcttttcccttgtgagtc

SEQ ID NO: 314212 - DNA, 25 bp, Probe Sequence
ttacagcttctgatcccttggatag

SEQ ID NO: 314213 - DNA, 25 bp, Probe Sequence
ttgcaaatgtcgatgaccattagaa

SEQ ID NO: 314214 - DNA, 25 bp, Probe Sequence
ttcagaattcagaggcagggagcaa

SEQ ID NO: 314215 - DNA, 25 bp, Probe Sequence
ttcacgcataagaggcagtgcgaac

SEQ ID NO: 314216 - DNA, 25 bp, Probe Sequence
ttcgccagcaacaatgtgaccgata

SEQ ID NO: 314217 - DNA, 25 bp, Probe Sequence
ttacagcgcaacagcagcctgcagc

SEQ ID NO: 314218 - DNA, 25 bp, Probe Sequence
ttacacaggatcactgcctcatcac

SEQ ID NO: 314219 - DNA, 25 bp, Probe Sequence
ttcacagaggacgagctgccctatg

SEQ ID NO: 314220 - DNA, 25 bp, Probe Sequence
ttcacagagctgtctagcccaggtg

SEQ ID NO: 314221 - DNA, 25 bp, Probe Sequence
ttcaaactgcagagcccagtattct

SEQ ID NO: 314222 - DNA, 25 bp, Probe Sequence
ttaataccaagacacctcatctgct

SEQ ID NO: 314223 - DNA, 25 bp, Probe Sequence
ttaatacctcctccaaatcatcatt

SEQ ID NO: 314224 - DNA, 25 bp, Probe Sequence
ttaataactcttcccactgcatatt

SEQ ID NO: 314225 - DNA, 25 bp, Probe Sequence
ttcgatcaaccctgccaggcaattt

SEQ ID NO: 314226 - DNA, 25 bp, Probe Sequence
ttcctgaatccctgcctaaaattaa

SEQ ID NO: 314227 - DNA, 25 bp, Probe Sequence
ttcttcctgccctgttattaattaa

SEQ ID NO: 314228 - DNA, 25 bp, Probe Sequence
ttctttctcctcagtttccaaagta

SEQ ID NO: 314229 - DNA, 25 bp, Probe Sequence
ttctttacctaggcgcttgtctaag

SEQ ID NO: 314230 - DNA, 25 bp, Probe Sequence
ttctaattcctgcatccttttcaaa

SEQ ID NO: 314231 - DNA, 25 bp, Probe Sequence
ttcaaattctctatcctttctaagt

SEQ ID NO: 314232 - DNA, 25 bp, Probe Sequence
ttcagaaatctaaactattttactt

SEQ ID NO: 314233 - DNA, 25 bp, Probe Sequence
ttaattcactgacgcctcattttcc

SEQ ID NO: 314234 - DNA, 25 bp, Probe Sequence
ttaatccaagcctacgttttcacac

SEQ ID NO: 314235 - DNA, 25 bp, Probe Sequence
ttaacctgcaaaatctgttctaaca

SEQ ID NO: 314236 - DNA, 25 bp, Probe Sequence
ttaacctgcaaaatctgttctaaca

SEQ ID NO: 314237 - DNA, 25 bp, Probe Sequence
ttaatcctgggagtctttgtttgca

SEQ ID NO: 314238 - DNA, 25 bp, Probe Sequence
ttaatcctgtgtttatctaacttca

SEQ ID NO: 314239 - DNA, 25 bp, Probe Sequence
ttaagtagtgtatcctgcacctact

SEQ ID NO: 314240 - DNA, 25 bp, Probe Sequence
ttaagtagtctagatctcagttaat

SEQ ID NO: 314241 - DNA, 25 bp, Probe Sequence
ttaattaattcagtcttctgttaat

SEQ ID NO: 314242 - DNA, 25 bp, Probe Sequence
ttaataaatgtgccttcattttttc

SEQ ID NO: 314243 - DNA, 25 bp, Probe Sequence
ttaaagagatagcttctcttctttc

SEQ ID NO: 314244 - DNA, 25 bp, Probe Sequence
ttcagaacaaacaattcctccgtcc

SEQ ID NO: 314245 - DNA, 25 bp, Probe Sequence
ttcatgaccaaccgactacttcaga

SEQ ID NO: 314246 - DNA, 25 bp, Probe Sequence
ttcaaatcaatcgaactgagttcta

SEQ ID NO: 314247 - DNA, 25 bp, Probe Sequence
ttcaaatcgtccgcgatgacatgct

SEQ ID NO: 314248 - DNA, 25 bp, Probe Sequence
ttcaaaagtgcctgcagtctgagcc

SEQ ID NO: 314249 - DNA, 25 bp, Probe Sequence
ttaaacaaccaccatgtcgagcaaa

SEQ ID NO: 314250 - DNA, 25 bp, Probe Sequence
ttaattcaaagctcatgctccccta

SEQ ID NO: 314251 - DNA, 25 bp, Probe Sequence
ttaaccaatagcatctacccctaaa

SEQ ID NO: 314252 - DNA, 25 bp, Probe Sequence
ttcaaaatatacattcaaacttaaa

SEQ ID NO: 314253 - DNA, 25 bp, Probe Sequence
ttaatccaatccactaacactttag

SEQ ID NO: 314254 - DNA, 25 bp, Probe Sequence
ttaatgccagtcctcatgtaacctc

SEQ ID NO: 314255 - DNA, 25 bp, Probe Sequence
ttcaaccagataatttatatttcta

SEQ ID NO: 314256 - DNA, 25 bp, Probe Sequence
ttcagaccaagaatttgacaactca

SEQ ID NO: 314257 - DNA, 25 bp, Probe Sequence
ttcagatacaagcatgtaacaaaaa

SEQ ID NO: 314258 - DNA, 25 bp, Probe Sequence
ttaatcaaggcttttaacatgaaca

SEQ ID NO: 314259 - DNA, 25 bp, Probe Sequence
ttaaagcaatctatgtaactgtaaa

SEQ ID NO: 314260 - DNA, 25 bp, Probe Sequence
ttcaaagcagtcttagtcagaggaa

SEQ ID NO: 314261 - DNA, 25 bp, Probe Sequence
ttcaagccaatttcagtcagggatt

SEQ ID NO: 314262 - DNA, 25 bp, Probe Sequence
ttcaaccaattatcagcaaactcta

SEQ ID NO: 314263 - DNA, 25 bp, Probe Sequence
ttcaacctttctgcataaaactgta

SEQ ID NO: 314264 - DNA, 25 bp, Probe Sequence
ttcaaccctccaaaagagcccatga

SEQ ID NO: 314265 - DNA, 25 bp, Probe Sequence
ttgacccctggattaaagtcctaat

SEQ ID NO: 314266 - DNA, 25 bp, Probe Sequence
ttggcccctctttgtaaggccttgt

SEQ ID NO: 314267 - DNA, 25 bp, Probe Sequence
ttgaacctactgttgtaaactgcct

SEQ ID NO: 314268 - DNA, 25 bp, Probe Sequence
ttcaaggctcctgcttaaagtccac

SEQ ID NO: 314269 - DNA, 25 bp, Probe Sequence
ttcaatttctatgtctaacgtcaac

SEQ ID NO: 314270 - DNA, 25 bp, Probe Sequence
ttcactttcctgggtaaggagtact

SEQ ID NO: 314271 - DNA, 25 bp, Probe Sequence
ttcacctatactggctgtggaggga

SEQ ID NO: 314272 - DNA, 25 bp, Probe Sequence
ttcaacagaagctgtgctgccacgg

SEQ ID NO: 314273 - DNA, 25 bp, Probe Sequence
ttcaagaccagcctggccaacatgg

SEQ ID NO: 314274 - DNA, 25 bp, Probe Sequence
ttcaagaacacgcctggcaacataa

SEQ ID NO: 314275 - DNA, 25 bp, Probe Sequence
ttcaataccccacttgcaacaatga

SEQ ID NO: 314276 - DNA, 25 bp, Probe Sequence
ttaagagctcccattgtacagcatg

SEQ ID NO: 314277 - DNA, 25 bp, Probe Sequence
ttcattggcccataggtacattgga

SEQ ID NO: 314278 - DNA, 25 bp, Probe Sequence
ttctggccccttgagtactgccaga

SEQ ID NO: 314279 - DNA, 25 bp, Probe Sequence
ttaagccccagttatgcaactgcaa

SEQ ID NO: 314280 - DNA, 25 bp, Probe Sequence
ttaagactcagctcactagactcca

SEQ ID NO: 314281 - DNA, 25 bp, Probe Sequence
ttaaatcaggctgcatctcaaccac

SEQ ID NO: 314282 - DNA, 25 bp, Probe Sequence
ttcaacatctctggccatgtcaacc

SEQ ID NO: 314283 - DNA, 25 bp, Probe Sequence
ttcaggctcgtgctaagctagcgcc

SEQ ID NO: 314284 - DNA, 25 bp, Probe Sequence
ttcatggatcagcgattttcctgcc

SEQ ID NO: 314285 - DNA, 25 bp, Probe Sequence
ttcggacccatattttccatagcca

SEQ ID NO: 314286 - DNA, 25 bp, Probe Sequence
ttcggacttatactgatcccaagtt

SEQ ID NO: 314287 - DNA, 25 bp, Probe Sequence
ttgccgaatttgtcgtgcctacaat

SEQ ID NO: 314288 - DNA, 25 bp, Probe Sequence
ttcgattactattcgtgcctagcaa

SEQ ID NO: 314289 - DNA, 25 bp, Probe Sequence
ttcagaaaccagttggctctagcta

SEQ ID NO: 314290 - DNA, 25 bp, Probe Sequence
ttcagtcagcccatggtctatagta

SEQ ID NO: 314291 - DNA, 25 bp, Probe Sequence
ttcagtcctactctgctttggtaca

SEQ ID NO: 314292 - DNA, 25 bp, Probe Sequence
ttcagttttgctcatctagggaaaa

SEQ ID NO: 314293 - DNA, 25 bp, Probe Sequence
ttcacttttgcagattgggtaacac

SEQ ID NO: 314294 - DNA, 25 bp, Probe Sequence
ttcagctcttcacagggggtagaac

SEQ ID NO: 314295 - DNA, 25 bp, Probe Sequence
ttcctcccagaagacgcgtggtagc

SEQ ID NO: 314296 - DNA, 25 bp, Probe Sequence
ttcactgaccaaaaagcgcctggac

SEQ ID NO: 314297 - DNA, 25 bp, Probe Sequence
ttcaccaccataaaacccttgagca

SEQ ID NO: 314298 - DNA, 25 bp, Probe Sequence
ttcactcaaaaatcacaccttagaa

SEQ ID NO: 314299 - DNA, 25 bp, Probe Sequence
ttccataaagaggcaaacggtaata

SEQ ID NO: 314300 - DNA, 25 bp, Probe Sequence
ttaagaaaactggcaactgggaaga

SEQ ID NO: 314301 - DNA, 25 bp, Probe Sequence
ttaagacaaattcccatccaaaaat

SEQ ID NO: 314302 - DNA, 25 bp, Probe Sequence
ttaaagttacaacctacagagaaat

SEQ ID NO: 314303 - DNA, 25 bp, Probe Sequence
ttggaaaccccacctacaagatgta

SEQ ID NO: 314304 - DNA, 25 bp, Probe Sequence
ttctaaaccctacctggataaggat

SEQ ID NO: 314305 - DNA, 25 bp, Probe Sequence
ttcttcaactgcgtgaccaggcatc

SEQ ID NO: 314306 - DNA, 25 bp, Probe Sequence
ttaatcacagaggtgacatcccatc

SEQ ID NO: 314307 - DNA, 25 bp, Probe Sequence
ttcagctacagggtgaccaacgcaa

SEQ ID NO: 314308 - DNA, 25 bp, Probe Sequence
ttcagttcagtgtatgaccaaaagc

SEQ ID NO: 314309 - DNA, 25 bp, Probe Sequence
ttcaatgtcactgtcaccaagactg

SEQ ID NO: 314310 - DNA, 25 bp, Probe Sequence
ttcaagtctccttacctgagagcag

SEQ ID NO: 314311 - DNA, 25 bp, Probe Sequence
ttcaagacatgagaactctgagtgc

SEQ ID NO: 314312 - DNA, 25 bp, Probe Sequence
ttaactctgacacaattggatgctg

SEQ ID NO: 314313 - DNA, 25 bp, Probe Sequence
ttcagtgcctgaagggcagggtctg

SEQ ID NO: 314314 - DNA, 25 bp, Probe Sequence
ttcacgcactatcgatagggcaccg

SEQ ID NO: 314315 - DNA, 25 bp, Probe Sequence
ttcacaggcaattatgggactctaa

SEQ ID NO: 314316 - DNA, 25 bp, Probe Sequence
ttcaagctcaacaagtcagaactaa

SEQ ID NO: 314317 - DNA, 25 bp, Probe Sequence
ttaagctgcaaaaccaaatctcatt

SEQ ID NO: 314318 - DNA, 25 bp, Probe Sequence
ttaactgaataatactatgtgcatg

SEQ ID NO: 314319 - DNA, 25 bp, Probe Sequence
ttaactgaactttatcattggcatt

SEQ ID NO: 314320 - DNA, 25 bp, Probe Sequence
ttaatctaagttccatgacatgtga

SEQ ID NO: 314321 - DNA, 25 bp, Probe Sequence
ttcaatgtataatgcctcaagtgtg

SEQ ID NO: 314322 - DNA, 25 bp, Probe Sequence
ttcaagttattgggctcagtgctgt

SEQ ID NO: 314323 - DNA, 25 bp, Probe Sequence
ttcaagcctttgccctgaggtgtta

SEQ ID NO: 314324 - DNA, 25 bp, Probe Sequence
ttcaactcttgcacctggagttctg

SEQ ID NO: 314325 - DNA, 25 bp, Probe Sequence
ttaactctaaagctccatgtcctgg

SEQ ID NO: 314326 - DNA, 25 bp, Probe Sequence
ttaactctcaattgcattaagtcct

SEQ ID NO: 314327 - DNA, 25 bp, Probe Sequence
ttaacatccagcactgtaagaagct

SEQ ID NO: 314328 - DNA, 25 bp, Probe Sequence
ttaatggctcagctcatcatacaga

SEQ ID NO: 314329 - DNA, 25 bp, Probe Sequence
ttaagagatcacctcacatccatta

SEQ ID NO: 314330 - DNA, 25 bp, Probe Sequence
ttaagatgcatccatgtttccagtg

SEQ ID NO: 314331 - DNA, 25 bp, Probe Sequence
ttcaaatgcccactttccagtttgg

SEQ ID NO: 314332 - DNA, 25 bp, Probe Sequence
ttaacactccatatctcaatgtctt

SEQ ID NO: 314333 - DNA, 25 bp, Probe Sequence
ttaacctctcattttaatgtcaaat

SEQ ID NO: 314334 - DNA, 25 bp, Probe Sequence
ttaatccgtcaaattcttgtataac

SEQ ID NO: 314335 - DNA, 25 bp, Probe Sequence
ttcacaccaggccaatccttgttaa

SEQ ID NO: 314336 - DNA, 25 bp, Probe Sequence
ttcagcccaggcaaaccaagtgcag

SEQ ID NO: 314337 - DNA, 25 bp, Probe Sequence
ttcaccgcacagacaccaaatggat

SEQ ID NO: 314338 - DNA, 25 bp, Probe Sequence
ttcagaccactcgccaagacagtct

SEQ ID NO: 314339 - DNA, 25 bp, Probe Sequence
ttcagaccagccagaaggagcttcc

SEQ ID NO: 314340 - DNA, 25 bp, Probe Sequence
ttcatatccagcctaaaggtggttg

SEQ ID NO: 314341 - DNA, 25 bp, Probe Sequence
ttgctttgagttggaatcggtttgc

SEQ ID NO: 314342 - DNA, 25 bp, Probe Sequence
ttgattatggtaggacctttttggt

SEQ ID NO: 314343 - DNA, 25 bp, Probe Sequence
ttaagtgcagtcatttctttttggt

SEQ ID NO: 314344 - DNA, 25 bp, Probe Sequence
ttaagatcttgactcttcatttgtt

SEQ ID NO: 314345 - DNA, 25 bp, Probe Sequence
ttaagatctctaatctgttttgagt

SEQ ID NO: 314346 - DNA, 25 bp, Probe Sequence
ttaagcatttgcttctgttttccct

SEQ ID NO: 314347 - DNA, 25 bp, Probe Sequence
ttaatgtttgtggctttctctccag

SEQ ID NO: 314348 - DNA, 25 bp, Probe Sequence
ttaagctctgttctttgttgctgca

SEQ ID NO: 314349 - DNA, 25 bp, Probe Sequence
ttaactgcttcctttatgactatgc

SEQ ID NO: 314350 - DNA, 25 bp, Probe Sequence
ttaactcttctcttgtgtatatgca

SEQ ID NO: 314351 - DNA, 25 bp, Probe Sequence
ttaaccattgtcttgttctgtgatg

SEQ ID NO: 314352 - DNA, 25 bp, Probe Sequence
ttaactgagctcaattgttctgata

SEQ ID NO: 314353 - DNA, 25 bp, Probe Sequence
ttaatcatctgctctgtttctgcta

SEQ ID NO: 314354 - DNA, 25 bp, Probe Sequence
ttcaccaagccagtgctttctgtgc

SEQ ID NO: 314355 - DNA, 25 bp, Probe Sequence
ttcaccaagccagtgctttctgtgc

SEQ ID NO: 314356 - DNA, 25 bp, Probe Sequence
ttcaccatggagctttgtctctggc

SEQ ID NO: 314357 - DNA, 25 bp, Probe Sequence
ttcaaggtgctgctttgcatgcctg

SEQ ID NO: 314358 - DNA, 25 bp, Probe Sequence
ttaatggtcctgtctgatgcatcct

SEQ ID NO: 314359 - DNA, 25 bp, Probe Sequence
ttcaaggtccagactgtctctccaa

SEQ ID NO: 314360 - DNA, 25 bp, Probe Sequence
ttcaaagctggagtctgtcctccta

SEQ ID NO: 314361 - DNA, 25 bp, Probe Sequence
ttcaaagggatctgatccttttgaa

SEQ ID NO: 314362 - DNA, 25 bp, Probe Sequence
ttcacctgggactgttaatttgaga

SEQ ID NO: 314363 - DNA, 25 bp, Probe Sequence
ttctactgggacttttacaccaaca

SEQ ID NO: 314364 - DNA, 25 bp, Probe Sequence
ttcttcaggaactgggagacgtaca

SEQ ID NO: 314365 - DNA, 25 bp, Probe Sequence
ttctgccggaacccggacaacgaca

SEQ ID NO: 314366 - DNA, 25 bp, Probe Sequence
ttcctcaggaagcgcgttgaaccca

SEQ ID NO: 314367 - DNA, 25 bp, Probe Sequence
ttcacttgtgcatgggctaaaacca

SEQ ID NO: 314368 - DNA, 25 bp, Probe Sequence
ttcagccgagagggactattaccca

SEQ ID NO: 314369 - DNA, 25 bp, Probe Sequence
ttcacctggaagcatttgtttctac

SEQ ID NO: 314370 - DNA, 25 bp, Probe Sequence
ttcacaaggattcttctatttcacc

SEQ ID NO: 314371 - DNA, 25 bp, Probe Sequence
ttcagcaaggactggtctttctatc

SEQ ID NO: 314372 - DNA, 25 bp, Probe Sequence
ttcactaggagtgggatccaggctc

SEQ ID NO: 314373 - DNA, 25 bp, Probe Sequence
ttcacaaacagtgcttccagtcctc

SEQ ID NO: 314374 - DNA, 25 bp, Probe Sequence
ttcacaaaaaacttccaatgccatt

SEQ ID NO: 314375 - DNA, 25 bp, Probe Sequence
ttcacattgaataaacttacagcca

SEQ ID NO: 314376 - DNA, 25 bp, Probe Sequence
ttcagtctgatatatggattaccac

SEQ ID NO: 314377 - DNA, 25 bp, Probe Sequence
ttcaatgcgagacaagattggcgtc

SEQ ID NO: 314378 - DNA, 25 bp, Probe Sequence
ttcatacccaaactgtctggcagtc

SEQ ID NO: 314379 - DNA, 25 bp, Probe Sequence
ttgcaatatccatagttggagcagc

SEQ ID NO: 314380 - DNA, 25 bp, Probe Sequence
ttcaataccggagatcatgcaagct

SEQ ID NO: 314381 - DNA, 25 bp, Probe Sequence
ttcaaacgcggtgtcagaggccctg

SEQ ID NO: 314382 - DNA, 25 bp, Probe Sequence
ttcaagaggagggcactagggccct

SEQ ID NO: 314383 - DNA, 25 bp, Probe Sequence
ttaacaagatgagccttgtgctccc

SEQ ID NO: 314384 - DNA, 25 bp, Probe Sequence
ttaacaaagcacatcttgcaccgcc

SEQ ID NO: 314385 - DNA, 25 bp, Probe Sequence
ttaacaaactgctttcacatcccaa

SEQ ID NO: 314386 - DNA, 25 bp, Probe Sequence
ttaagcagagacttttgaatcctca

SEQ ID NO: 314387 - DNA, 25 bp, Probe Sequence
ttaatgagtgctttagtgagtcctc

SEQ ID NO: 314388 - DNA, 25 bp, Probe Sequence
ttaagtgtgcttagagtcatccctc

SEQ ID NO: 314389 - DNA, 25 bp, Probe Sequence
ttaagattctgaaggtgctaccatt

SEQ ID NO: 314390 - DNA, 25 bp, Probe Sequence
ttcatagtcttaacaggtggccatt

SEQ ID NO: 314391 - DNA, 25 bp, Probe Sequence
ttaagtatttaaccatagctatcat

SEQ ID NO: 314392 - DNA, 25 bp, Probe Sequence
ttaacttttcaacctgagtacctga

SEQ ID NO: 314393 - DNA, 25 bp, Probe Sequence
ttaacgtattactcagagtcaccca

SEQ ID NO: 314394 - DNA, 25 bp, Probe Sequence
ttgaaatgtttaggtaactgcaaaa

SEQ ID NO: 314395 - DNA, 25 bp, Probe Sequence
ttaatatggtcctttaagccataaa

SEQ ID NO: 314396 - DNA, 25 bp, Probe Sequence
ttcaaatggtacgttataacatcaa

SEQ ID NO: 314397 - DNA, 25 bp, Probe Sequence
ttccacagtgatatattaaacccaa

SEQ ID NO: 314398 - DNA, 25 bp, Probe Sequence
ttcacaaagattacaaaccgcccca

SEQ ID NO: 314399 - DNA, 25 bp, Probe Sequence
ttcgcaaggagtggaaaccaccacc

SEQ ID NO: 314400 - DNA, 25 bp, Probe Sequence
ttcacactggagagaaaccctacaa

SEQ ID NO: 314401 - DNA, 25 bp, Probe Sequence
ttccactgagaaagctaagccctac

SEQ ID NO: 314402 - DNA, 25 bp, Probe Sequence
ttccggggaatccaatcccattctt

SEQ ID NO: 314403 - DNA, 25 bp, Probe Sequence
ttcagtggggactcagtgcccaggc

SEQ ID NO: 314404 - DNA, 25 bp, Probe Sequence
ttcgtcgagaactcagtctgcgcgt

SEQ ID NO: 314405 - DNA, 25 bp, Probe Sequence
ttcttctacaactcatacactcgta

SEQ ID NO: 314406 - DNA, 25 bp, Probe Sequence
ttctgactccaatttaaaccaggaa

SEQ ID NO: 314407 - DNA, 25 bp, Probe Sequence
ttctacacaatataaatatccagta

SEQ ID NO: 314408 - DNA, 25 bp, Probe Sequence
ttggcactacgatcaaaactactga

SEQ ID NO: 314409 - DNA, 25 bp, Probe Sequence
ttaacatcaggatatggaactttga

SEQ ID NO: 314410 - DNA, 25 bp, Probe Sequence
ttcaaacacgtatggaattcattcc

SEQ ID NO: 314411 - DNA, 25 bp, Probe Sequence
ttcacaaacgtattcagcaaccact

SEQ ID NO: 314412 - DNA, 25 bp, Probe Sequence
ttaaggagcagtttccagacatcag

SEQ ID NO: 314413 - DNA, 25 bp, Probe Sequence
ttcaacaggcccttcctgatgatca

SEQ ID NO: 314414 - DNA, 25 bp, Probe Sequence
ttcaacaagcacgaccatggatgat

SEQ ID NO: 314415 - DNA, 25 bp, Probe Sequence
ttaactcaaaatcatgatgcatgca

SEQ ID NO: 314416 - DNA, 25 bp, Probe Sequence
ttaacatacattcatctgatcagca

SEQ ID NO: 314417 - DNA, 25 bp, Probe Sequence
ttaacacagattcctcagatccaga

SEQ ID NO: 314418 - DNA, 25 bp, Probe Sequence
ttcaaagagattcctgcaggccaga

SEQ ID NO: 314419 - DNA, 25 bp, Probe Sequence
ttcagaaggactctcaatcactcag

SEQ ID NO: 314420 - DNA, 25 bp, Probe Sequence
ttcagcaatggggctgacctctccg

SEQ ID NO: 314421 - DNA, 25 bp, Probe Sequence
ttcagcagggtggtgtattctacag

SEQ ID NO: 314422 - DNA, 25 bp, Probe Sequence
ttcacgggagactttatctgacagc

SEQ ID NO: 314423 - DNA, 25 bp, Probe Sequence
ttcactgtggagaccccagataaga

SEQ ID NO: 314424 - DNA, 25 bp, Probe Sequence
ttcttcgtgcagacctgccgggaag

SEQ ID NO: 314425 - DNA, 25 bp, Probe Sequence
ttctacgtgcgagagccgccgaatg

SEQ ID NO: 314426 - DNA, 25 bp, Probe Sequence
ttctccgggcagtgtagccgacgat

SEQ ID NO: 314427 - DNA, 25 bp, Probe Sequence
ttctttggcacagagctagccccag

SEQ ID NO: 314428 - DNA, 25 bp, Probe Sequence
ttctctcatggtggaagccagtccc

SEQ ID NO: 314429 - DNA, 25 bp, Probe Sequence
ttccacagcagttgaaccattccac

SEQ ID NO: 314430 - DNA, 25 bp, Probe Sequence
ttcgacagtctttggtcatgcttca

SEQ ID NO: 314431 - DNA, 25 bp, Probe Sequence
ttaacaggcttttgcttgctatcta

SEQ ID NO: 314432 - DNA, 25 bp, Probe Sequence
ttaacagtgtgttggcgctttgctt

SEQ ID NO: 314433 - DNA, 25 bp, Probe Sequence
ttaatatttcattcagctgcttggt

SEQ ID NO: 314434 - DNA, 25 bp, Probe Sequence
ttaatcatgttatcagccctctgtt

SEQ ID NO: 314435 - DNA, 25 bp, Probe Sequence
ttaagatgttgatcacacagcttca

SEQ ID NO: 314436 - DNA, 25 bp, Probe Sequence
ttcacagagtaatcaaagttcatga

SEQ ID NO: 314437 - DNA, 25 bp, Probe Sequence
ttcacagcagtgttaaaatggcctg

SEQ ID NO: 314438 - DNA, 25 bp, Probe Sequence
ttaaggttttactatgcccaaacag

SEQ ID NO: 314439 - DNA, 25 bp, Probe Sequence
ttaacatctacttacaagccaaaaa

SEQ ID NO: 314440 - DNA, 25 bp, Probe Sequence
ttaacatctagtttctcgtcagaaa

SEQ ID NO: 314441 - DNA, 25 bp, Probe Sequence
ttctacctagctcaccctgagataa

SEQ ID NO: 314442 - DNA, 25 bp, Probe Sequence
ttcacacctcgtcattcacgaaaga

SEQ ID NO: 314443 - DNA, 25 bp, Probe Sequence
ttcatacctcggaaggcatcggaga

SEQ ID NO: 314444 - DNA, 25 bp, Probe Sequence
ttctacgctcgggagcggctggggg

SEQ ID NO: 314445 - DNA, 25 bp, Probe Sequence
ttctacggcgactggagagggtgag

SEQ ID NO: 314446 - DNA, 25 bp, Probe Sequence
ttctaccccaacttcgcagagggca

SEQ ID NO: 314447 - DNA, 25 bp, Probe Sequence
ttctaccacacctgtggcggtagcc

SEQ ID NO: 314448 - DNA, 25 bp, Probe Sequence
ttcatcctactccacgtgggagttc

SEQ ID NO: 314449 - DNA, 25 bp, Probe Sequence
ttcacccacttcctgacaggtgtgt

SEQ ID NO: 314450 - DNA, 25 bp, Probe Sequence
ttcacacacattcaggaacctgttt

SEQ ID NO: 314451 - DNA, 25 bp, Probe Sequence
ttcagtccaaagagaacctttctgt

SEQ ID NO: 314452 - DNA, 25 bp, Probe Sequence
ttcagttaacaagatactttgactt

SEQ ID NO: 314453 - DNA, 25 bp, Probe Sequence
ttcagtattcacaccaatcggtctt

SEQ ID NO: 314454 - DNA, 25 bp, Probe Sequence
ttcactactaaactgcaagagggct

SEQ ID NO: 314455 - DNA, 25 bp, Probe Sequence
ttcactactaactgttgagacgtgc

SEQ ID NO: 314456 - DNA, 25 bp, Probe Sequence
ttcccactgaaaattctatgacggc

SEQ ID NO: 314457 - DNA, 25 bp, Probe Sequence
ttcccactacacatcaaaggcaagc

SEQ ID NO: 314458 - DNA, 25 bp, Probe Sequence
ttcaccatgtacgcccagaggagga

SEQ ID NO: 314459 - DNA, 25 bp, Probe Sequence
ttcaccttccaccacaagtggaggc

SEQ ID NO: 314460 - DNA, 25 bp, Probe Sequence
ttgcccttgcacatgtaagttactc

SEQ ID NO: 314461 - DNA, 25 bp, Probe Sequence
ttcagccttgccatgtcaaactaaa

SEQ ID NO: 314462 - DNA, 25 bp, Probe Sequence
ttcacgtgtgccaccgacacggaga

SEQ ID NO: 314463 - DNA, 25 bp, Probe Sequence
ttcacggttctccaatgagtagaag

SEQ ID NO: 314464 - DNA, 25 bp, Probe Sequence
ttcagggctcctcacaattaaaatg

SEQ ID NO: 314465 - DNA, 25 bp, Probe Sequence
ttcaaccacacctaaattaacaaat

SEQ ID NO: 314466 - DNA, 25 bp, Probe Sequence
ttcagactaccctaatttgtaaatg

SEQ ID NO: 314467 - DNA, 25 bp, Probe Sequence
ttgaccagaccattaatttgatttt

SEQ ID NO: 314468 - DNA, 25 bp, Probe Sequence
ttgaccaggtcaagttttaggatat

SEQ ID NO: 314469 - DNA, 25 bp, Probe Sequence
ttcatccaggtcagttcaggaagta

SEQ ID NO: 314470 - DNA, 25 bp, Probe Sequence
ttcacacatggtcaactgggacatg

SEQ ID NO: 314471 - DNA, 25 bp, Probe Sequence
ttcacagtagttcccagggcagcag

SEQ ID NO: 314472 - DNA, 25 bp, Probe Sequence
ttcaagtacccccagggcagatgcc

SEQ ID NO: 314473 - DNA, 25 bp, Probe Sequence
ttcacagtcagcggcacgggagcaa

SEQ ID NO: 314474 - DNA, 25 bp, Probe Sequence
ttcacagtcagctgctcaacggaat

SEQ ID NO: 314475 - DNA, 25 bp, Probe Sequence
ttcatcgtcagccagctaaccagaa

SEQ ID NO: 314476 - DNA, 25 bp, Probe Sequence
ttcacgacctactcatctgacaaag

SEQ ID NO: 314477 - DNA, 25 bp, Probe Sequence
ttcaccaggtacttacagagcagat

SEQ ID NO: 314478 - DNA, 25 bp, Probe Sequence
ttcacccgtagtagatcagactcat

SEQ ID NO: 314479 - DNA, 25 bp, Probe Sequence
ttcacggcccagatgatcaccatca

SEQ ID NO: 314480 - DNA, 25 bp, Probe Sequence
ttcagtggcccacttatgacaccat

SEQ ID NO: 314481 - DNA, 25 bp, Probe Sequence
ttcagctaacgcttccagaccgcgg

SEQ ID NO: 314482 - DNA, 25 bp, Probe Sequence
ttcagtaggcctacaaaacctgatg

SEQ ID NO: 314483 - DNA, 25 bp, Probe Sequence
ttcgagggcctgtaaatatctatat

SEQ ID NO: 314484 - DNA, 25 bp, Probe Sequence
ttctcaggatgatttaaaactaatt

SEQ ID NO: 314485 - DNA, 25 bp, Probe Sequence
ttcacgtaaatgccaaccatctaca

SEQ ID NO: 314486 - DNA, 25 bp, Probe Sequence
ttcacttcagaaataataccaacaa

SEQ ID NO: 314487 - DNA, 25 bp, Probe Sequence
ttcacctatatctaaatagcgcacc

SEQ ID NO: 314488 - DNA, 25 bp, Probe Sequence
ttcaactgattagacaaggcccgcc

SEQ ID NO: 314489 - DNA, 25 bp, Probe Sequence
ttcaactgattagacaaggcccgcc

SEQ ID NO: 314490 - DNA, 25 bp, Probe Sequence
ttcaagctgctttggacaactgaca

SEQ ID NO: 314491 - DNA, 25 bp, Probe Sequence
ttaactgcttcagacacctagatcc

SEQ ID NO: 314492 - DNA, 25 bp, Probe Sequence
ttcacaccggttaccgctatgaccc

SEQ ID NO: 314493 - DNA, 25 bp, Probe Sequence
ttcacctcggaggtcacctatgacc

SEQ ID NO: 314494 - DNA, 25 bp, Probe Sequence
ttcacaccaggagcgatccatctac

SEQ ID NO: 314495 - DNA, 25 bp, Probe Sequence
ttcaagccagggtgcatcctcagaa

SEQ ID NO: 314496 - DNA, 25 bp, Probe Sequence
ttaatcctggagtctcactgtctgc

SEQ ID NO: 314497 - DNA, 25 bp, Probe Sequence
ttgactcagcagtgcatctaatgat

SEQ ID NO: 314498 - DNA, 25 bp, Probe Sequence
ttgactagacatcctgtgcaatagt

SEQ ID NO: 314499 - DNA, 25 bp, Probe Sequence
ttcatctcaacgtctgtaatatcat

SEQ ID NO: 314500 - DNA, 25 bp, Probe Sequence
ttcagatcatcaaactgattatata

SEQ ID NO: 314501 - DNA, 25 bp, Probe Sequence
ttcaatatgctcaacgcattcatga

SEQ ID NO: 314502 - DNA, 25 bp, Probe Sequence
ttcaatgagccaatatatccaagat

SEQ ID NO: 314503 - DNA, 25 bp, Probe Sequence
ttcaatatggagaagacctagaatt

SEQ ID NO: 314504 - DNA, 25 bp, Probe Sequence
ttcacacaggaaacacgctagtgac

SEQ ID NO: 314505 - DNA, 25 bp, Probe Sequence
ttcacacaggaaaccagctatgacc

SEQ ID NO: 314506 - DNA, 25 bp, Probe Sequence
ttcacaccaggaaacagctatgacc

SEQ ID NO: 314507 - DNA, 25 bp, Probe Sequence
ttcagaccacagacaacctgctccc

SEQ ID NO: 314508 - DNA, 25 bp, Probe Sequence
ttcagacccagtaactgtccgcagc

SEQ ID NO: 314509 - DNA, 25 bp, Probe Sequence
ttcaaccctggatgctttcaactgg

SEQ ID NO: 314510 - DNA, 25 bp, Probe Sequence
ttcataccccaagcttacaactgca

SEQ ID NO: 314511 - DNA, 25 bp, Probe Sequence
ttcactccaccaaatcttacaaatc

SEQ ID NO: 314512 - DNA, 25 bp, Probe Sequence
ttgcactcgcaatttaactttaact

SEQ ID NO: 314513 - DNA, 25 bp, Probe Sequence
ttcatccgtgaaaaacttgcaatac

SEQ ID NO: 314514 - DNA, 25 bp, Probe Sequence
ttcatcacgttctcacacattgcga

SEQ ID NO: 314515 - DNA, 25 bp, Probe Sequence
ttcatcacgttctcacacattgcga

SEQ ID NO: 314516 - DNA, 25 bp, Probe Sequence
ttcacagaactcctcacactggtga

SEQ ID NO: 314517 - DNA, 25 bp, Probe Sequence
ttcacagtcctggtgcacacgagag

SEQ ID NO: 314518 - DNA, 25 bp, Probe Sequence
ttcaaggctgtgtctgccaagagca

SEQ ID NO: 314519 - DNA, 25 bp, Probe Sequence
ttaatcctctgcctgctgatggaga

SEQ ID NO: 314520 - DNA, 25 bp, Probe Sequence
ttcaatgccccgaagctggaaaccg

SEQ ID NO: 314521 - DNA, 25 bp, Probe Sequence
ttcagatgccccaaacttgaatccc

SEQ ID NO: 314522 - DNA, 25 bp, Probe Sequence
ttaagtgccgtgtgctggaactgcc

SEQ ID NO: 314523 - DNA, 25 bp, Probe Sequence
ttcaggtgccgggcgcaggaactgt

SEQ ID NO: 314524 - DNA, 25 bp, Probe Sequence
ttcaggtgccgggcgcaggaactgt

SEQ ID NO: 314525 - DNA, 25 bp, Probe Sequence
ttcaggcggctcagcagcgagaact

SEQ ID NO: 314526 - DNA, 25 bp, Probe Sequence
ttcagccagaagatgcaggagcaga

SEQ ID NO: 314527 - DNA, 25 bp, Probe Sequence
ttcagtcggaatggcgctcagcaga

SEQ ID NO: 314528 - DNA, 25 bp, Probe Sequence
ttcgatgcgctggtgcaggcacaga

SEQ ID NO: 314529 - DNA, 25 bp, Probe Sequence
ttcactgcgtgcttatgaccaacat

SEQ ID NO: 314530 - DNA, 25 bp, Probe Sequence
ttcaaggtgctcatgacccagcaac

SEQ ID NO: 314531 - DNA, 25 bp, Probe Sequence
ttcatatgacgtatgtcccatgaga

SEQ ID NO: 314532 - DNA, 25 bp, Probe Sequence
ttcatcgatcctgggtctttgagat

SEQ ID NO: 314533 - DNA, 25 bp, Probe Sequence
ttcatgcctcctacgtattacgatg

SEQ ID NO: 314534 - DNA, 25 bp, Probe Sequence
ttctgagccctgacatgtgcttggg

SEQ ID NO: 314535 - DNA, 25 bp, Probe Sequence
ttctgatatcgtatgtgtggaggtt

SEQ ID NO: 314536 - DNA, 25 bp, Probe Sequence
ttcagtgcaagttttttggtgctgt

SEQ ID NO: 314537 - DNA, 25 bp, Probe Sequence
ttcaagagcagtgtccgtggtgtgc

SEQ ID NO: 314538 - DNA, 25 bp, Probe Sequence
ttcggcagcgatggctactacgtgg

SEQ ID NO: 314539 - DNA, 25 bp, Probe Sequence
ttcggactgtttgctcaagctgggc

SEQ ID NO: 314540 - DNA, 25 bp, Probe Sequence
ttcggttttttccgcatgtacgctc

SEQ ID NO: 314541 - DNA, 25 bp, Probe Sequence
ttcgttcacttcacggatgttcagt

SEQ ID NO: 314542 - DNA, 25 bp, Probe Sequence
ttcaggtccttatacatggtgtggt

SEQ ID NO: 314543 - DNA, 25 bp, Probe Sequence
ttcagtgtgtttctacagtatgttt

SEQ ID NO: 314544 - DNA, 25 bp, Probe Sequence
ttcagtcttaccttacaaatttctt

SEQ ID NO: 314545 - DNA, 25 bp, Probe Sequence
ttcaatttatccaataagaatctac

SEQ ID NO: 314546 - DNA, 25 bp, Probe Sequence
ttaatttacttgtacaattcattgt

SEQ ID NO: 314547 - DNA, 25 bp, Probe Sequence
ttaattttcattcatcaacctctca

SEQ ID NO: 314548 - DNA, 25 bp, Probe Sequence
ttctattttaatctcaatccccttt

SEQ ID NO: 314549 - DNA, 25 bp, Probe Sequence
ttcttttctagatttcctctacctt

SEQ ID NO: 314550 - DNA, 25 bp, Probe Sequence
ttcttatttgtatttgttttagtat

SEQ ID NO: 314551 - DNA, 25 bp, Probe Sequence
ttcacgttggtttctgcttttaatt

SEQ ID NO: 314552 - DNA, 25 bp, Probe Sequence
ttcacaattagttaacttattcaat

SEQ ID NO: 314553 - DNA, 25 bp, Probe Sequence
ttcaccttaaaatctttctaagcaa

SEQ ID NO: 314554 - DNA, 25 bp, Probe Sequence
ttcacctgtttaagacttactacca

SEQ ID NO: 314555 - DNA, 25 bp, Probe Sequence
ttcaacttttatatgttacattgcc

SEQ ID NO: 314556 - DNA, 25 bp, Probe Sequence
ttcaccctctttaatttcacaacat

SEQ ID NO: 314557 - DNA, 25 bp, Probe Sequence
ttctcaagccgtttttattacactt

SEQ ID NO: 314558 - DNA, 25 bp, Probe Sequence
ttctcaagctcgtcaagaaaattga

SEQ ID NO: 314559 - DNA, 25 bp, Probe Sequence
ttcatcaactggattgacaaaatca

SEQ ID NO: 314560 - DNA, 25 bp, Probe Sequence
ttcacctcctgttagcaaaaatcaa

SEQ ID NO: 314561 - DNA, 25 bp, Probe Sequence
ttcacgttcacatggaaaagtcaga

SEQ ID NO: 314562 - DNA, 25 bp, Probe Sequence
ttcacacgtcaatagagataggtct

SEQ ID NO: 314563 - DNA, 25 bp, Probe Sequence
ttcacacatgtctttaggtggaaat

SEQ ID NO: 314564 - DNA, 25 bp, Probe Sequence
ttcacagtcttctattgttggacca

SEQ ID NO: 314565 - DNA, 25 bp, Probe Sequence
ttcacagttctgtaatgtaggcact

SEQ ID NO: 314566 - DNA, 25 bp, Probe Sequence
ttctgcgtcatcagtatctcggcac

SEQ ID NO: 314567 - DNA, 25 bp, Probe Sequence
ttcgcgttctgcgataccagagcag

SEQ ID NO: 314568 - DNA, 25 bp, Probe Sequence
ttcgtattctcgtatctgccatgag

SEQ ID NO: 314569 - DNA, 25 bp, Probe Sequence
ttcttgttccgatactctgagaagt

SEQ ID NO: 314570 - DNA, 25 bp, Probe Sequence
ttcagtgttcctgttgcttggactt

SEQ ID NO: 314571 - DNA, 25 bp, Probe Sequence
ttcattgttcttgtgttctttgcct

SEQ ID NO: 314572 - DNA, 25 bp, Probe Sequence
ttcattgtttgacgtttccactgca

SEQ ID NO: 314573 - DNA, 25 bp, Probe Sequence
ttcaagtgcttacttgctacctcca

SEQ ID NO: 314574 - DNA, 25 bp, Probe Sequence
ttcaaatcatgttcttatacctaat

SEQ ID NO: 314575 - DNA, 25 bp, Probe Sequence
ttcagaatctgataaatagctctaa

SEQ ID NO: 314576 - DNA, 25 bp, Probe Sequence
ttcaacctgaaaatcaagcagtatg

SEQ ID NO: 314577 - DNA, 25 bp, Probe Sequence
ttcacaccaaatttgcatataaatg

SEQ ID NO: 314578 - DNA, 25 bp, Probe Sequence
ttcagcaccaagtcatgtttaaaag

SEQ ID NO: 314579 - DNA, 25 bp, Probe Sequence
ttcacccacgagacacttgaaaggt

SEQ ID NO: 314580 - DNA, 25 bp, Probe Sequence
ttcacccctgagaatattgacccct

SEQ ID NO: 314581 - DNA, 25 bp, Probe Sequence
ttcccctagggaatgtgtccctact

SEQ ID NO: 314582 - DNA, 25 bp, Probe Sequence
ttcttttcaggtcatgtgtccctga

SEQ ID NO: 314583 - DNA, 25 bp, Probe Sequence
ttccaactatggagaatggtcctaa

SEQ ID NO: 314584 - DNA, 25 bp, Probe Sequence
ttcactttgcggagttggtccttaa

SEQ ID NO: 314585 - DNA, 25 bp, Probe Sequence
ttcaccttggttaggtcgtccagga

SEQ ID NO: 314586 - DNA, 25 bp, Probe Sequence
ttccctgtgccctggaagttcaggg

SEQ ID NO: 314587 - DNA, 25 bp, Probe Sequence
ttcctccgtccgctaagtatggcgg

SEQ ID NO: 314588 - DNA, 25 bp, Probe Sequence
ttcacccactcccttgaagttgtgg

SEQ ID NO: 314589 - DNA, 25 bp, Probe Sequence
ttcatccaatcctcactgggtgggg

SEQ ID NO: 314590 - DNA, 25 bp, Probe Sequence
ttcatgcgcaatgctgacttggagc

SEQ ID NO: 314591 - DNA, 25 bp, Probe Sequence
ttcaggctatgctgctttgggcagg

SEQ ID NO: 314592 - DNA, 25 bp, Probe Sequence
ttcactgctatctcaagggcatagt

SEQ ID NO: 314593 - DNA, 25 bp, Probe Sequence
ttctgcagctatgcgcaatgtggca

SEQ ID NO: 314594 - DNA, 25 bp, Probe Sequence
ttcagcattcttagcctgtggcaat

SEQ ID NO: 314595 - DNA, 25 bp, Probe Sequence
ttcagcatttcatctgctatggcca

SEQ ID NO: 314596 - DNA, 25 bp, Probe Sequence
ttcagatttgacccatcagatctca

SEQ ID NO: 314597 - DNA, 25 bp, Probe Sequence
ttcagtcattgacccatgaatgtag

SEQ ID NO: 314598 - DNA, 25 bp, Probe Sequence
ttcagtcttgacggtgaatggaaga

SEQ ID NO: 314599 - DNA, 25 bp, Probe Sequence
ttcagtcttttaggattagaagaat

SEQ ID NO: 314600 - DNA, 25 bp, Probe Sequence
ttcagtcgtccatatgaccccagaa

SEQ ID NO: 314601 - DNA, 25 bp, Probe Sequence
ttcagtcgtctaagtccaaccaata

SEQ ID NO: 314602 - DNA, 25 bp, Probe Sequence
ttctgttgtacaagtccacacacgt

SEQ ID NO: 314603 - DNA, 25 bp, Probe Sequence
ttcagatggtagccagtgactcaga

SEQ ID NO: 314604 - DNA, 25 bp, Probe Sequence
ttcagcaggttccagtgcctgactt

SEQ ID NO: 314605 - DNA, 25 bp, Probe Sequence
ttcagggatcgccaggcgttttctg

SEQ ID NO: 314606 - DNA, 25 bp, Probe Sequence
ttcagtcaagtccgggattcttcta

SEQ ID NO: 314607 - DNA, 25 bp, Probe Sequence
ttcaatcggccactggccatttttt

SEQ ID NO: 314608 - DNA, 25 bp, Probe Sequence
ttcttggtgacagtggaatctttgt

SEQ ID NO: 314609 - DNA, 25 bp, Probe Sequence
ttcattaagatctctaatctgtttt

SEQ ID NO: 314610 - DNA, 25 bp, Probe Sequence
ttctacatcggtctaatctacttta

SEQ ID NO: 314611 - DNA, 25 bp, Probe Sequence
ttctccggcggatataatacttata

SEQ ID NO: 314612 - DNA, 25 bp, Probe Sequence
ttctaccgagaattaaaacttcaga

SEQ ID NO: 314613 - DNA, 25 bp, Probe Sequence
ttcatagccgaatacataaacatta

SEQ ID NO: 314614 - DNA, 25 bp, Probe Sequence
ttcagagcctgaaaacatctaaaat

SEQ ID NO: 314615 - DNA, 25 bp, Probe Sequence
ttcataccttattccctataaagta

SEQ ID NO: 314616 - DNA, 25 bp, Probe Sequence
ttcaacactcttacacctgttatgg

SEQ ID NO: 314617 - DNA, 25 bp, Probe Sequence
ttcacctctagtcactttctattgc

SEQ ID NO: 314618 - DNA, 25 bp, Probe Sequence
ttcacctgggagtgctttcgatgtg

SEQ ID NO: 314619 - DNA, 25 bp, Probe Sequence
ttaatgctgggatccatatttagtt

SEQ ID NO: 314620 - DNA, 25 bp, Probe Sequence
ttcaaggcgtgatctctgtcacttt

SEQ ID NO: 314621 - DNA, 25 bp, Probe Sequence
ttcaaggagctcacttggcctgctt

SEQ ID NO: 314622 - DNA, 25 bp, Probe Sequence
ttcagagagagtggttggagccccc

SEQ ID NO: 314623 - DNA, 25 bp, Probe Sequence
ttcagagtgcaggagttgtggtcag

SEQ ID NO: 314624 - DNA, 25 bp, Probe Sequence
ttcaaatcggataggagtgtcaggc

SEQ ID NO: 314625 - DNA, 25 bp, Probe Sequence
ttaattcatttaccagttgatggac

SEQ ID NO: 314626 - DNA, 25 bp, Probe Sequence
ttaatctacttaccacactgtgggt

SEQ ID NO: 314627 - DNA, 25 bp, Probe Sequence
ttcaactttgtcccacctgggagaa

SEQ ID NO: 314628 - DNA, 25 bp, Probe Sequence
ttcaacttttgttcatcctagccag

SEQ ID NO: 314629 - DNA, 25 bp, Probe Sequence
ttcaacatttttccatatttacagt

SEQ ID NO: 314630 - DNA, 25 bp, Probe Sequence
ttcagacattaactggcttgttcaa

SEQ ID NO: 314631 - DNA, 25 bp, Probe Sequence
ttcaacataacaagctcattattaa

SEQ ID NO: 314632 - DNA, 25 bp, Probe Sequence
ttcacctgattaaatattgctctaa

SEQ ID NO: 314633 - DNA, 25 bp, Probe Sequence
ttcacctgttcagtgtatactgtac

SEQ ID NO: 314634 - DNA, 25 bp, Probe Sequence
ttcaccgtcagcatatgagccgtat

SEQ ID NO: 314635 - DNA, 25 bp, Probe Sequence
ttcacctgctgcaattgtgaccagc

SEQ ID NO: 314636 - DNA, 25 bp, Probe Sequence
ttcacagctggaatatgtcacatga

SEQ ID NO: 314637 - DNA, 25 bp, Probe Sequence
ttctccagagtccatgccattaagt

SEQ ID NO: 314638 - DNA, 25 bp, Probe Sequence
ttcaaagatgaccaccatatatagt

SEQ ID NO: 314639 - DNA, 25 bp, Probe Sequence
ttaatagtcattccaaatatgagat

SEQ ID NO: 314640 - DNA, 25 bp, Probe Sequence
ttcagtattcatgtccacattgaga

SEQ ID NO: 314641 - DNA, 25 bp, Probe Sequence
ttaatgcatttggccctattgaatt

SEQ ID NO: 314642 - DNA, 25 bp, Probe Sequence
ttaatgttatcctcttgctatataa

SEQ ID NO: 314643 - DNA, 25 bp, Probe Sequence
ttaattccactcccttgtaacaatt

SEQ ID NO: 314644 - DNA, 25 bp, Probe Sequence
ttaatacacctctgcttgaggagaa

SEQ ID NO: 314645 - DNA, 25 bp, Probe Sequence
ttaattacccttttgcaggcaccac

SEQ ID NO: 314646 - DNA, 25 bp, Probe Sequence
ttaattacctttttccataggagct

SEQ ID NO: 314647 - DNA, 25 bp, Probe Sequence
ttaatgtaccttcagctctctaaac

SEQ ID NO: 314648 - DNA, 25 bp, Probe Sequence
ttaattactcatggcaggttctaga

SEQ ID NO: 314649 - DNA, 25 bp, Probe Sequence
ttaatctttctccaatgatcctatg

SEQ ID NO: 314650 - DNA, 25 bp, Probe Sequence
ttaatgtccattgaactactagttt

SEQ ID NO: 314651 - DNA, 25 bp, Probe Sequence
ttcaattccatcctaaaactccttt

SEQ ID NO: 314652 - DNA, 25 bp, Probe Sequence
ttaatgtccgtttaacacgttgctt

SEQ ID NO: 314653 - DNA, 25 bp, Probe Sequence
ttgaattttttcaaaccagtggctg

SEQ ID NO: 314654 - DNA, 25 bp, Probe Sequence
ttaattttcttgttacacccactgc

SEQ ID NO: 314655 - DNA, 25 bp, Probe Sequence
ttaatttagatttttctccatcctg

SEQ ID NO: 314656 - DNA, 25 bp, Probe Sequence
ttcaaatttaatcttcatccctctg

SEQ ID NO: 314657 - DNA, 25 bp, Probe Sequence
ttcaatttataacgttctcagtcct

SEQ ID NO: 314658 - DNA, 25 bp, Probe Sequence
ttaatgttaaagttgtgccttcaca

SEQ ID NO: 314659 - DNA, 25 bp, Probe Sequence
ttctctgcttaaagaatgcccttta

SEQ ID NO: 314660 - DNA, 25 bp, Probe Sequence
ttcttgcttagacagtcagcatttg

SEQ ID NO: 314661 - DNA, 25 bp, Probe Sequence
ttcttcttagggccatagatgtttg

SEQ ID NO: 314662 - DNA, 25 bp, Probe Sequence
ttctctttacgggacagatttctaa

SEQ ID NO: 314663 - DNA, 25 bp, Probe Sequence
ttctgtttaggcccactaaggcaaa

SEQ ID NO: 314664 - DNA, 25 bp, Probe Sequence
ttctttaaggtcttccagtgccaaa

SEQ ID NO: 314665 - DNA, 25 bp, Probe Sequence
ttctgtgatacagccattccgtaca

SEQ ID NO: 314666 - DNA, 25 bp, Probe Sequence
ttcagtgaacacacccctataacca

SEQ ID NO: 314667 - DNA, 25 bp, Probe Sequence
ttgcttttccttgtccttaacagca

SEQ ID NO: 314668 - DNA, 25 bp, Probe Sequence
ttcggtttcatattctacttaacaa

SEQ ID NO: 314669 - DNA, 25 bp, Probe Sequence
ttcacgttgtctaccttcataacaa

SEQ ID NO: 314670 - DNA, 25 bp, Probe Sequence
ttcagtcttgtctcttgtctagaaa

SEQ ID NO: 314671 - DNA, 25 bp, Probe Sequence
ttcatttcggatcctgtttaacaaa

SEQ ID NO: 314672 - DNA, 25 bp, Probe Sequence
ttcacttctgaacagtttacagcac

SEQ ID NO: 314673 - DNA, 25 bp, Probe Sequence
ttcagttgctgaactatcttccagg

SEQ ID NO: 314674 - DNA, 25 bp, Probe Sequence
ttcagttcaaagtatttccaatttc

SEQ ID NO: 314675 - DNA, 25 bp, Probe Sequence
ttcagttaaatttttcacctgctgt

SEQ ID NO: 314676 - DNA, 25 bp, Probe Sequence
ttcacttaaactttgtcacttctgc

SEQ ID NO: 314677 - DNA, 25 bp, Probe Sequence
ttcctgtgaaaatgtgtactttcca

SEQ ID NO: 314678 - DNA, 25 bp, Probe Sequence
ttccttcaaaatgtctactgttcac

SEQ ID NO: 314679 - DNA, 25 bp, Probe Sequence
ttcttgacaaaacctaacttgcgca

SEQ ID NO: 314680 - DNA, 25 bp, Probe Sequence
ttctctcaagaataccttttccagg

SEQ ID NO: 314681 - DNA, 25 bp, Probe Sequence
ttcttctaaaaatctgtataccagg

SEQ ID NO: 314682 - DNA, 25 bp, Probe Sequence
ttcttccaaatatgactttaccctt

SEQ ID NO: 314683 - DNA, 25 bp, Probe Sequence
ttctaaaagtagccctctttctcct

SEQ ID NO: 314684 - DNA, 25 bp, Probe Sequence
ttctaaaggctacctttgtattctc

SEQ ID NO: 314685 - DNA, 25 bp, Probe Sequence
ttctggaaggaactttcggctataa

SEQ ID NO: 314686 - DNA, 25 bp, Probe Sequence
ttctgggggtccacttgtctgtaat

SEQ ID NO: 314687 - DNA, 25 bp, Probe Sequence
ttggggaggaaaacttattctgaat

SEQ ID NO: 314688 - DNA, 25 bp, Probe Sequence
ttgtggggtatatcccctatcttca

SEQ ID NO: 314689 - DNA, 25 bp, Probe Sequence
ttcagggagaaacctctccttcccg

SEQ ID NO: 314690 - DNA, 25 bp, Probe Sequence
ttcagggagaaacctctccttcccg

SEQ ID NO: 314691 - DNA, 25 bp, Probe Sequence
ttcaagtgacaatcctctccttggc

SEQ ID NO: 314692 - DNA, 25 bp, Probe Sequence
ttcagagtgtcaaacaactgccatt

SEQ ID NO: 314693 - DNA, 25 bp, Probe Sequence
ttcagctttcagaaacctggatatg

SEQ ID NO: 314694 - DNA, 25 bp, Probe Sequence
ttcaccttcagttgtctctgatgta

SEQ ID NO: 314695 - DNA, 25 bp, Probe Sequence
ttcagagctctgccatttcttgagt

SEQ ID NO: 314696 - DNA, 25 bp, Probe Sequence
ttcacaccttatttcattgactgct

SEQ ID NO: 314697 - DNA, 25 bp, Probe Sequence
ttaatcacctgtttgtggtcatgct

SEQ ID NO: 314698 - DNA, 25 bp, Probe Sequence
ttcaatcccttcttgtttcagtgac

SEQ ID NO: 314699 - DNA, 25 bp, Probe Sequence
ttcaaacttcctagtgtggtgtaca

SEQ ID NO: 314700 - DNA, 25 bp, Probe Sequence
ttctaggagctcctgggtagctgaa

SEQ ID NO: 314701 - DNA, 25 bp, Probe Sequence
ttctgggactttattctatgaaaac

SEQ ID NO: 314702 - DNA, 25 bp, Probe Sequence
ttcttggacatgaatatgttctttc

SEQ ID NO: 314703 - DNA, 25 bp, Probe Sequence
ttctcgaagaaatttcctttcactt

SEQ ID NO: 314704 - DNA, 25 bp, Probe Sequence
ttcttgacagatttagtcgttccac

SEQ ID NO: 314705 - DNA, 25 bp, Probe Sequence
ttctctacagatgtcccattttcag

SEQ ID NO: 314706 - DNA, 25 bp, Probe Sequence
ttcgctaaacttctgactttcatat

SEQ ID NO: 314707 - DNA, 25 bp, Probe Sequence
ttctgtaccacaatttacgcttcaa

SEQ ID NO: 314708 - DNA, 25 bp, Probe Sequence
ttcttacacaatatcccgcggaacc

SEQ ID NO: 314709 - DNA, 25 bp, Probe Sequence
ttcatttcaaatactcccttttgac

SEQ ID NO: 314710 - DNA, 25 bp, Probe Sequence
ttcagtattaaactctcctttgata

SEQ ID NO: 314711 - DNA, 25 bp, Probe Sequence
ttcagacagaagtatcttcctttac

SEQ ID NO: 314712 - DNA, 25 bp, Probe Sequence
ttcaagcagaagttgccgccctaac

SEQ ID NO: 314713 - DNA, 25 bp, Probe Sequence
ttcagaagagaatccccaccaactt

SEQ ID NO: 314714 - DNA, 25 bp, Probe Sequence
ttccaggagacatgacccactaacg

SEQ ID NO: 314715 - DNA, 25 bp, Probe Sequence
ttccaggaataggacccccagtgag

SEQ ID NO: 314716 - DNA, 25 bp, Probe Sequence
ttccagagatcatcgactaccttta

SEQ ID NO: 314717 - DNA, 25 bp, Probe Sequence
ttcacaatattttactaccttacac

SEQ ID NO: 314718 - DNA, 25 bp, Probe Sequence
ttcaactgttcatatctactttata

SEQ ID NO: 314719 - DNA, 25 bp, Probe Sequence
ttcaagtgtctattgcttaattgtt

SEQ ID NO: 314720 - DNA, 25 bp, Probe Sequence
ttcaaggtgataagcatttattggt

SEQ ID NO: 314721 - DNA, 25 bp, Probe Sequence
ttcatggggagaagatgagtacttg

SEQ ID NO: 314722 - DNA, 25 bp, Probe Sequence
ttcatcgagggtggacggactgtca

SEQ ID NO: 314723 - DNA, 25 bp, Probe Sequence
ttcatctggaagcctacggtgttca

SEQ ID NO: 314724 - DNA, 25 bp, Probe Sequence
ttcttgagctgccctacgttaacaa

SEQ ID NO: 314725 - DNA, 25 bp, Probe Sequence
ttcattagtgtcgaaggatctaaaa

SEQ ID NO: 314726 - DNA, 25 bp, Probe Sequence
ttcatttgtatccaaggtgctgaat

SEQ ID NO: 314727 - DNA, 25 bp, Probe Sequence
ttaattttcgcattgttgacagata

SEQ ID NO: 314728 - DNA, 25 bp, Probe Sequence
ttaattttgccattatattgcatat

SEQ ID NO: 314729 - DNA, 25 bp, Probe Sequence
ttcagtcagaggccttatttgatat

SEQ ID NO: 314730 - DNA, 25 bp, Probe Sequence
ttcagctcagtagctttggtcatag

SEQ ID NO: 314731 - DNA, 25 bp, Probe Sequence
ttgcactagtctgaggtggccactg

SEQ ID NO: 314732 - DNA, 25 bp, Probe Sequence
ttgcactagtctgaggtggccactg

SEQ ID NO: 314733 - DNA, 25 bp, Probe Sequence
ttcagatcagtttaggttccagtgg

SEQ ID NO: 314734 - DNA, 25 bp, Probe Sequence
ttcaatctgttttgagcttggaggc

SEQ ID NO: 314735 - DNA, 25 bp, Probe Sequence
ttcaatggtttctacacggagcgcc

SEQ ID NO: 314736 - DNA, 25 bp, Probe Sequence
ttcagaggttcctaactcagggacc

SEQ ID NO: 314737 - DNA, 25 bp, Probe Sequence
ttgcaagttgtataactcaggcgtc

SEQ ID NO: 314738 - DNA, 25 bp, Probe Sequence
ttcactgaaatatacctcaggctga

SEQ ID NO: 314739 - DNA, 25 bp, Probe Sequence
ttcacgtaactgaacaccacctgtt

SEQ ID NO: 314740 - DNA, 25 bp, Probe Sequence
ttcacttatttatagccaactgatt

SEQ ID NO: 314741 - DNA, 25 bp, Probe Sequence
ttcagcgttttattgaccctctggc

SEQ ID NO: 314742 - DNA, 25 bp, Probe Sequence
ttcagcggttctcagactggtctgg

SEQ ID NO: 314743 - DNA, 25 bp, Probe Sequence
ttcagagagatgtcttggaatttgg

SEQ ID NO: 314744 - DNA, 25 bp, Probe Sequence
ttcagcgaaatcaggctattcaggc

SEQ ID NO: 314745 - DNA, 25 bp, Probe Sequence
ttcaggatgttcaccatgttgggca

SEQ ID NO: 314746 - DNA, 25 bp, Probe Sequence
ttcagggttgccgctgagtgtgcag

SEQ ID NO: 314747 - DNA, 25 bp, Probe Sequence
ttcagtgttgtggccctagctatgg

SEQ ID NO: 314748 - DNA, 25 bp, Probe Sequence
ttcagcgccctgggcgctgcctatg

SEQ ID NO: 314749 - DNA, 25 bp, Probe Sequence
ttcaccacctgggcactattatcaa

SEQ ID NO: 314750 - DNA, 25 bp, Probe Sequence
ttcttcgccaggccaggaatcacaa

SEQ ID NO: 314751 - DNA, 25 bp, Probe Sequence
ttcttcgccaggccaggaatcacaa

SEQ ID NO: 314752 - DNA, 25 bp, Probe Sequence
ttcatgccgccaggactgcaagaac

SEQ ID NO: 314753 - DNA, 25 bp, Probe Sequence
ttcacgcctcaggcaattagacact

SEQ ID NO: 314754 - DNA, 25 bp, Probe Sequence
ttcacacccaggctcaagacggagc

SEQ ID NO: 314755 - DNA, 25 bp, Probe Sequence
ttcacagcgccaaggctataaccca

SEQ ID NO: 314756 - DNA, 25 bp, Probe Sequence
ttcaccgaagtgactctatgaccca

SEQ ID NO: 314757 - DNA, 25 bp, Probe Sequence
ttcagtagttgcttccctaactgca

SEQ ID NO: 314758 - DNA, 25 bp, Probe Sequence
ttcagccagatccttccaatgaagc

SEQ ID NO: 314759 - DNA, 25 bp, Probe Sequence
ttcactgatgtccttcagacagaag

SEQ ID NO: 314760 - DNA, 25 bp, Probe Sequence
ttcagttctccttaaagaagttagg

SEQ ID NO: 314761 - DNA, 25 bp, Probe Sequence
ttcagttccacttggaggccttcat

SEQ ID NO: 314762 - DNA, 25 bp, Probe Sequence
ttcagtgtcaaatggcggtcttata

SEQ ID NO: 314763 - DNA, 25 bp, Probe Sequence
ttcaggcaccagtgtctgtgttgtt

SEQ ID NO: 314764 - DNA, 25 bp, Probe Sequence
ttcaggcaccagtgtctgtgttgtt

SEQ ID NO: 314765 - DNA, 25 bp, Probe Sequence
ttcggaccaggaccaggaagtaact

SEQ ID NO: 314766 - DNA, 25 bp, Probe Sequence
ttcctaccacttccagtaagaaaat

SEQ ID NO: 314767 - DNA, 25 bp, Probe Sequence
ttcctacctttggcagtacaatcta

SEQ ID NO: 314768 - DNA, 25 bp, Probe Sequence
ttctttgccttaccagaccagttaa

SEQ ID NO: 314769 - DNA, 25 bp, Probe Sequence
ttctttaatgcttgaagtccgttca

SEQ ID NO: 314770 - DNA, 25 bp, Probe Sequence
ttcatcttaatctgatattccccca

SEQ ID NO: 314771 - DNA, 25 bp, Probe Sequence
ttcatcttcattgttagtcctcaac

SEQ ID NO: 314772 - DNA, 25 bp, Probe Sequence
ttcataccagatgcgttggtccata

SEQ ID NO: 314773 - DNA, 25 bp, Probe Sequence
ttcataccagatgcgttggtccata

SEQ ID NO: 314774 - DNA, 25 bp, Probe Sequence
ttcagcaacgtcagttggtctcgca

SEQ ID NO: 314775 - DNA, 25 bp, Probe Sequence
ttcaccaggtcattgattgcctcct

SEQ ID NO: 314776 - DNA, 25 bp, Probe Sequence
ttcaaagatatcttgacgctctctt

SEQ ID NO: 314777 - DNA, 25 bp, Probe Sequence
ttcagagaatctttaccctccatcc

SEQ ID NO: 314778 - DNA, 25 bp, Probe Sequence
ttcaggaacaggaacgccttctcaa

SEQ ID NO: 314779 - DNA, 25 bp, Probe Sequence
ttcagcatagacttaactcccttaa

SEQ ID NO: 314780 - DNA, 25 bp, Probe Sequence
ttcaaaactccagcttgcccaataa

SEQ ID NO: 314781 - DNA, 25 bp, Probe Sequence
ttcagaacaatgtagacttccaaaa

SEQ ID NO: 314782 - DNA, 25 bp, Probe Sequence
ttcattgagcagttagctcatttga

SEQ ID NO: 314783 - DNA, 25 bp, Probe Sequence
ttcagcttcagcttaactgacagat

SEQ ID NO: 314784 - DNA, 25 bp, Probe Sequence
ttcactgtgatgctgcaccgatagg

SEQ ID NO: 314785 - DNA, 25 bp, Probe Sequence
ttcacatggtgttgcacaagtacgt

SEQ ID NO: 314786 - DNA, 25 bp, Probe Sequence
ttccaggctatggccatgcagtact

SEQ ID NO: 314787 - DNA, 25 bp, Probe Sequence
ttcatctcagcctccagagtagctg

SEQ ID NO: 314788 - DNA, 25 bp, Probe Sequence
ttctgtcgtcccaggctagcagaga

SEQ ID NO: 314789 - DNA, 25 bp, Probe Sequence
ttcatggcctacacgttcgagagag

SEQ ID NO: 314790 - DNA, 25 bp, Probe Sequence
ttcacgcaccaggccttattaagag

SEQ ID NO: 314791 - DNA, 25 bp, Probe Sequence
ttcacagcacagcacaccttataaa

SEQ ID NO: 314792 - DNA, 25 bp, Probe Sequence
ttcaacagcaatcccctgtcaaacc

SEQ ID NO: 314793 - DNA, 25 bp, Probe Sequence
ttcaagcccatcactcgcaaaagtg

SEQ ID NO: 314794 - DNA, 25 bp, Probe Sequence
ttcgtcccacttcctcaagaaatgg

SEQ ID NO: 314795 - DNA, 25 bp, Probe Sequence
ttcatcttcgactttctaaaaaagc

SEQ ID NO: 314796 - DNA, 25 bp, Probe Sequence
ttcatttgaaacttgcttacataaa

SEQ ID NO: 314797 - DNA, 25 bp, Probe Sequence
ttcatttgaggatgtcttataaaga

SEQ ID NO: 314798 - DNA, 25 bp, Probe Sequence
ttcactctgagtgttttatgagaaa

SEQ ID NO: 314799 - DNA, 25 bp, Probe Sequence
ttcactctaacttggttatgagact

SEQ ID NO: 314800 - DNA, 25 bp, Probe Sequence
ttcaccctactaaattcaagagctc

SEQ ID NO: 314801 - DNA, 25 bp, Probe Sequence
ttcacaccttgtaagaatctgaggc

SEQ ID NO: 314802 - DNA, 25 bp, Probe Sequence
ttcacctcatttataatccagtagg

SEQ ID NO: 314803 - DNA, 25 bp, Probe Sequence
ttcccccttcaagatgccatttgga

SEQ ID NO: 314804 - DNA, 25 bp, Probe Sequence
ttcacaacctctgtggtccgtagga

SEQ ID NO: 314805 - DNA, 25 bp, Probe Sequence
ttcagtacctctcatggggctgtga

SEQ ID NO: 314806 - DNA, 25 bp, Probe Sequence
ttcctagctccagatggggctgtta

SEQ ID NO: 314807 - DNA, 25 bp, Probe Sequence
ttcatctcccgctttgagggtttga

SEQ ID NO: 314808 - DNA, 25 bp, Probe Sequence
ttctctgtaccttggtggtgtttaa

SEQ ID NO: 314809 - DNA, 25 bp, Probe Sequence
ttcctttacttgcgtggtttcatgt

SEQ ID NO: 314810 - DNA, 25 bp, Probe Sequence
ttcactttttgttggtctttatatc

SEQ ID NO: 314811 - DNA, 25 bp, Probe Sequence
ttcacttttatttcagtccttatat

SEQ ID NO: 314812 - DNA, 25 bp, Probe Sequence
ttcaatactgtaatcaccttcttaa

SEQ ID NO: 314813 - DNA, 25 bp, Probe Sequence
ttcagatgaggctccaccttgttaa

SEQ ID NO: 314814 - DNA, 25 bp, Probe Sequence
ttcagtggagactccctggccaaca

SEQ ID NO: 314815 - DNA, 25 bp, Probe Sequence
ttcatgggagacttccttcatcaca

SEQ ID NO: 314816 - DNA, 25 bp, Probe Sequence
ttcagcagtgaactctggtgtctca

SEQ ID NO: 314817 - DNA, 25 bp, Probe Sequence
ttcagcagagacccatttgtgccca

SEQ ID NO: 314818 - DNA, 25 bp, Probe Sequence
ttcacatatgtcctcaagggccaca

SEQ ID NO: 314819 - DNA, 25 bp, Probe Sequence
ttcactatcatattcatcggcgtaa

SEQ ID NO: 314820 - DNA, 25 bp, Probe Sequence
ttcagcattagatgcaggtcgtaca

SEQ ID NO: 314821 - DNA, 25 bp, Probe Sequence
ttcagattgatttggagactggcaa

SEQ ID NO: 314822 - DNA, 25 bp, Probe Sequence
ttcactaatctgttgagagctaaaa

SEQ ID NO: 314823 - DNA, 25 bp, Probe Sequence
ttcacatacattctctgagccaaca

SEQ ID NO: 314824 - DNA, 25 bp, Probe Sequence
ttcacacaatacttcagacacacaa

SEQ ID NO: 314825 - DNA, 25 bp, Probe Sequence
ttcacataaagcttgctaccgctca

SEQ ID NO: 314826 - DNA, 25 bp, Probe Sequence
ttcaagcaagatttctaccagcccc

SEQ ID NO: 314827 - DNA, 25 bp, Probe Sequence
ttcaggcacgcatgtgtaccagtgg

SEQ ID NO: 314828 - DNA, 25 bp, Probe Sequence
ttcagaggctgctctctgatcctag

SEQ ID NO: 314829 - DNA, 25 bp, Probe Sequence
ttcaggcactcattcatctatcact

SEQ ID NO: 314830 - DNA, 25 bp, Probe Sequence
ttcagatgcagctatcattattcca

SEQ ID NO: 314831 - DNA, 25 bp, Probe Sequence
ttcaagctgtgtaatattccaatgt

SEQ ID NO: 314832 - DNA, 25 bp, Probe Sequence
ttgcatttctgcgaaagatcaaggt

SEQ ID NO: 314833 - DNA, 25 bp, Probe Sequence
ttgcattgttttggagtaagaattc

SEQ ID NO: 314834 - DNA, 25 bp, Probe Sequence
ttcattcctttgggtaagccagagg

SEQ ID NO: 314835 - DNA, 25 bp, Probe Sequence
ttctcttttggccctatacaaaggc

SEQ ID NO: 314836 - DNA, 25 bp, Probe Sequence
ttccaacttggcagtaaatctacgt

SEQ ID NO: 314837 - DNA, 25 bp, Probe Sequence
ttggaacttgtcataaaatcgatca

SEQ ID NO: 314838 - DNA, 25 bp, Probe Sequence
ttggcaacttatccataatttggga

SEQ ID NO: 314839 - DNA, 25 bp, Probe Sequence
ttcagccactttcaagatgttagaa

SEQ ID NO: 314840 - DNA, 25 bp, Probe Sequence
ttcacagactttatcaatgtataat

SEQ ID NO: 314841 - DNA, 25 bp, Probe Sequence
ttcaaacatatttctacatgtttct

SEQ ID NO: 314842 - DNA, 25 bp, Probe Sequence
ttcaaagcactcaactgacaggttt

SEQ ID NO: 314843 - DNA, 25 bp, Probe Sequence
ttcattgacctcaactacatggttt

SEQ ID NO: 314844 - DNA, 25 bp, Probe Sequence
ttcattatcttaagtacattgtaca

SEQ ID NO: 314845 - DNA, 25 bp, Probe Sequence
ttcatgaatctgtaactagaattta

SEQ ID NO: 314846 - DNA, 25 bp, Probe Sequence
ttcatgccttgtaaataacttgtat

SEQ ID NO: 314847 - DNA, 25 bp, Probe Sequence
ttcagttgttataaaccattgtgac

SEQ ID NO: 314848 - DNA, 25 bp, Probe Sequence
ttcacatttctaaatcccatcttga

SEQ ID NO: 314849 - DNA, 25 bp, Probe Sequence
ttcacttgtcattctactttctata

SEQ ID NO: 314850 - DNA, 25 bp, Probe Sequence
ttcatgttgttgcccagtgctttat

SEQ ID NO: 314851 - DNA, 25 bp, Probe Sequence
ttcagttgggtggcaaatttgcttc

SEQ ID NO: 314852 - DNA, 25 bp, Probe Sequence
ttcatgatttgagaagccttcgctt

SEQ ID NO: 314853 - DNA, 25 bp, Probe Sequence
ttcatgctcatatgtattgcctgtt

SEQ ID NO: 314854 - DNA, 25 bp, Probe Sequence
ttcagatctgaacattagcagtgat

SEQ ID NO: 314855 - DNA, 25 bp, Probe Sequence
ttcagactgctacattcactggtaa

SEQ ID NO: 314856 - DNA, 25 bp, Probe Sequence
ttcagaagctacaagacctggagaa

SEQ ID NO: 314857 - DNA, 25 bp, Probe Sequence
ttcacaacttgcaaatcatcgaaga

SEQ ID NO: 314858 - DNA, 25 bp, Probe Sequence
ttcaagcctagcaatccatcagaca

SEQ ID NO: 314859 - DNA, 25 bp, Probe Sequence
ttcaagtgctcagtgatcacatgga

SEQ ID NO: 314860 - DNA, 25 bp, Probe Sequence
ttcactatctcaggagccagtcacc

SEQ ID NO: 314861 - DNA, 25 bp, Probe Sequence
ttcatatactcagagctactccctg

SEQ ID NO: 314862 - DNA, 25 bp, Probe Sequence
ttcagcaagctacactacatccaca

SEQ ID NO: 314863 - DNA, 25 bp, Probe Sequence
ttcagcaaaacctgatcatcccacc

SEQ ID NO: 314864 - DNA, 25 bp, Probe Sequence
ttcgttcaagcctagcaatccatca

SEQ ID NO: 314865 - DNA, 25 bp, Probe Sequence
ttttcagggctgatgtcacatgtag

SEQ ID NO: 314866 - DNA, 25 bp, Probe Sequence
ttctttactactggatttgctattt

SEQ ID NO: 314867 - DNA, 25 bp, Probe Sequence
ttcgattacatccaggcagtctcta

SEQ ID NO: 314868 - DNA, 25 bp, Probe Sequence
ttcagttactcgggatttctacagc

SEQ ID NO: 314869 - DNA, 25 bp, Probe Sequence
ttcagttttgtgtttatttacagct

SEQ ID NO: 314870 - DNA, 25 bp, Probe Sequence
ttcggttggtaagttcttccagctg

SEQ ID NO: 314871 - DNA, 25 bp, Probe Sequence
ttctgagtcctgagacttttccgcg

SEQ ID NO: 314872 - DNA, 25 bp, Probe Sequence
ttctgattcctacatcgttttcacc

SEQ ID NO: 314873 - DNA, 25 bp, Probe Sequence
ttcatattgcctaaccgatttgata

SEQ ID NO: 314874 - DNA, 25 bp, Probe Sequence
ttcacagatctctaactgagcttta

SEQ ID NO: 314875 - DNA, 25 bp, Probe Sequence
ttcacagtgcataagcagttttttt

SEQ ID NO: 314876 - DNA, 25 bp, Probe Sequence
ttcagacatctgaggttttatttca

SEQ ID NO: 314877 - DNA, 25 bp, Probe Sequence
ttgactcacggggatttccaagtct

SEQ ID NO: 314878 - DNA, 25 bp, Probe Sequence
ttctctccaggggtcttgcaaaatt

SEQ ID NO: 314879 - DNA, 25 bp, Probe Sequence
ttcttgtagaatgtttccattgatt

SEQ ID NO: 314880 - DNA, 25 bp, Probe Sequence
ttcttggaaactgtcccattgcttc

SEQ ID NO: 314881 - DNA, 25 bp, Probe Sequence
ttctaggtatgagtttgcctttgtt

SEQ ID NO: 314882 - DNA, 25 bp, Probe Sequence
ttctacagtatgtttttccagctga

SEQ ID NO: 314883 - DNA, 25 bp, Probe Sequence
ttcattcagatacttcttatccctg

SEQ ID NO: 314884 - DNA, 25 bp, Probe Sequence
ttcttcagatagatcctgaagttac

SEQ ID NO: 314885 - DNA, 25 bp, Probe Sequence
ttctattggaataccggagctctga

SEQ ID NO: 314886 - DNA, 25 bp, Probe Sequence
ttcagacgggtagaggagtcatgaa

SEQ ID NO: 314887 - DNA, 25 bp, Probe Sequence
ttcaaaggcgtctaagtcaggcaga

SEQ ID NO: 314888 - DNA, 25 bp, Probe Sequence
ttctccaacgtgcacagtcaatgag

SEQ ID NO: 314889 - DNA, 25 bp, Probe Sequence
ttcaccaaggagccgctgatggagg

SEQ ID NO: 314890 - DNA, 25 bp, Probe Sequence
ttcaccaaggacctggagacactga

SEQ ID NO: 314891 - DNA, 25 bp, Probe Sequence
ttcaacaaccacgggaagccgcggc

SEQ ID NO: 314892 - DNA, 25 bp, Probe Sequence
ttgaaaagccaggttgaagccatcc

SEQ ID NO: 314893 - DNA, 25 bp, Probe Sequence
ttcaacaagccagatatagatgcct

SEQ ID NO: 314894 - DNA, 25 bp, Probe Sequence
ttcaacaagccagatatagatgcct

SEQ ID NO: 314895 - DNA, 25 bp, Probe Sequence
ttcacatccagcaaattaagtcaat

SEQ ID NO: 314896 - DNA, 25 bp, Probe Sequence
ttgacccagcattatttaggaatac

SEQ ID NO: 314897 - DNA, 25 bp, Probe Sequence
ttgaccgcagatttcggaaacttct

SEQ ID NO: 314898 - DNA, 25 bp, Probe Sequence
ttgccagaagaattgcggaaagtct

SEQ ID NO: 314899 - DNA, 25 bp, Probe Sequence
ttgcaaaaactgtcaggagggaccc

SEQ ID NO: 314900 - DNA, 25 bp, Probe Sequence
ttcacactaacacagcgagggactc

SEQ ID NO: 314901 - DNA, 25 bp, Probe Sequence
ttcacctaaagctcacaaggacttt

SEQ ID NO: 314902 - DNA, 25 bp, Probe Sequence
ttcacctaaccataaaaatcaattt

SEQ ID NO: 314903 - DNA, 25 bp, Probe Sequence
ttccttacccagtgaagaatctaca

SEQ ID NO: 314904 - DNA, 25 bp, Probe Sequence
ttctgctaccgtggggaagtgacta

SEQ ID NO: 314905 - DNA, 25 bp, Probe Sequence
ttctatctccaggagggcaagggcg

SEQ ID NO: 314906 - DNA, 25 bp, Probe Sequence
ttgaagcctcacttgggaaggaagt

SEQ ID NO: 314907 - DNA, 25 bp, Probe Sequence
ttcacacctctgcttggagaggaca

SEQ ID NO: 314908 - DNA, 25 bp, Probe Sequence
ttcactccatccctatggcagagga

SEQ ID NO: 314909 - DNA, 25 bp, Probe Sequence
ttcactctccacctatatgctatgg

SEQ ID NO: 314910 - DNA, 25 bp, Probe Sequence
ttcactcctaacatgatctgtgctg

SEQ ID NO: 314911 - DNA, 25 bp, Probe Sequence
ttcagtagccaatttgatcatttgg

SEQ ID NO: 314912 - DNA, 25 bp, Probe Sequence
ttcagcataccagtttgtctcttat

SEQ ID NO: 314913 - DNA, 25 bp, Probe Sequence
ttcacatactatacatttcagccat

SEQ ID NO: 314914 - DNA, 25 bp, Probe Sequence
ttcacagactcaacttgttacaaat

SEQ ID NO: 314915 - DNA, 25 bp, Probe Sequence
ttcaaactccacttgttcagtctga

SEQ ID NO: 314916 - DNA, 25 bp, Probe Sequence
ttcagaacccctgaacagtgcccaa

SEQ ID NO: 314917 - DNA, 25 bp, Probe Sequence
tctgtgacattcaggatgttcacca

SEQ ID NO: 314918 - DNA, 25 bp, Probe Sequence
ttcatactccacctgcaaaagctaa

SEQ ID NO: 314919 - DNA, 25 bp, Probe Sequence
ttcaggactcagctgcagctaagaa

SEQ ID NO: 314920 - DNA, 25 bp, Probe Sequence
ttcaggcatctctggcagcgaacac

SEQ ID NO: 314921 - DNA, 25 bp, Probe Sequence
ttcaggcatctctggcagcgaacac

SEQ ID NO: 314922 - DNA, 25 bp, Probe Sequence
ttcatagagctgtgtctgtatacac

SEQ ID NO: 314923 - DNA, 25 bp, Probe Sequence
ttcatattgcggcttctgctggccg

SEQ ID NO: 314924 - DNA, 25 bp, Probe Sequence
ttcatagtcgtattttgccaccgta

SEQ ID NO: 314925 - DNA, 25 bp, Probe Sequence
ttcatagacggcaggtgcccacctt

SEQ ID NO: 314926 - DNA, 25 bp, Probe Sequence
ttcatgaggcgacaggtcttcaaat

SEQ ID NO: 314927 - DNA, 25 bp, Probe Sequence
ttcatgaggcgacaggtcttcaaat

SEQ ID NO: 314928 - DNA, 25 bp, Probe Sequence
ttcagggcagcaactgccatttaaa

SEQ ID NO: 314929 - DNA, 25 bp, Probe Sequence
ttcactgagcaaaccagctttaaag

SEQ ID NO: 314930 - DNA, 25 bp, Probe Sequence
ttcagtagcagatgccgttcaaaag

SEQ ID NO: 314931 - DNA, 25 bp, Probe Sequence
ttcgtagcagtatgttggagccaaa

SEQ ID NO: 314932 - DNA, 25 bp, Probe Sequence
ttcagtcatctgtgaattaggtaaa

SEQ ID NO: 314933 - DNA, 25 bp, Probe Sequence
ttcagtcatctccaaaaacagtaaa

SEQ ID NO: 314934 - DNA, 25 bp, Probe Sequence
ttcagtcatctccaaaaacagtaaa

SEQ ID NO: 314935 - DNA, 25 bp, Probe Sequence
ttgcagtatcctttaaaagcaaaaa

SEQ ID NO: 314936 - DNA, 25 bp, Probe Sequence
ttcagtatactaccaagaagcaaag

SEQ ID NO: 314937 - DNA, 25 bp, Probe Sequence
ttcaaatcctcaccaacatccagga

SEQ ID NO: 314938 - DNA, 25 bp, Probe Sequence
ttcacagtgaccatcgcaaccagga

SEQ ID NO: 314939 - DNA, 25 bp, Probe Sequence
ttcacagtgcaaattccccacaagc

SEQ ID NO: 314940 - DNA, 25 bp, Probe Sequence
ttcacctgctggataagctactagc

SEQ ID NO: 314941 - DNA, 25 bp, Probe Sequence
ttcatccatgaaatccaagtaatac

SEQ ID NO: 314942 - DNA, 25 bp, Probe Sequence
ttctatacaactcaatctaagtcag

SEQ ID NO: 314943 - DNA, 25 bp, Probe Sequence
ttcttatccagccaaacgaagcttc

SEQ ID NO: 314944 - DNA, 25 bp, Probe Sequence
ttcttcaatacaaacaggatcactg

SEQ ID NO: 314945 - DNA, 25 bp, Probe Sequence
ttcttccatcgcaatgacctgtatt

SEQ ID NO: 314946 - DNA, 25 bp, Probe Sequence
ttcttccatcgcaatgacctgtatt

SEQ ID NO: 314947 - DNA, 25 bp, Probe Sequence
ttcattcccctgaagccaacagtga

SEQ ID NO: 314948 - DNA, 25 bp, Probe Sequence
ttcatcctccctgatcaagacaaga

SEQ ID NO: 314949 - DNA, 25 bp, Probe Sequence
ttcacaactgccaaacagagaataa

SEQ ID NO: 314950 - DNA, 25 bp, Probe Sequence
ttcaccctcacagccagataattgt

SEQ ID NO: 314951 - DNA, 25 bp, Probe Sequence
ttcagccctgacgacagcagtggtt

SEQ ID NO: 314952 - DNA, 25 bp, Probe Sequence
ttcaccacgatcgacaggaggaagt

SEQ ID NO: 314953 - DNA, 25 bp, Probe Sequence
ttcacgctcattccacaagagctaa

SEQ ID NO: 314954 - DNA, 25 bp, Probe Sequence
ttcacctgcagtcgcctagaaaact

SEQ ID NO: 314955 - DNA, 25 bp, Probe Sequence
ttcactgctggctgccttagaacct

SEQ ID NO: 314956 - DNA, 25 bp, Probe Sequence
ttcagtctagattgtcattaaattg

SEQ ID NO: 314957 - DNA, 25 bp, Probe Sequence
ttcacagctggtttgcaataaatgg

SEQ ID NO: 314958 - DNA, 25 bp, Probe Sequence
ttcagtgcaggtttggatacatctg

SEQ ID NO: 314959 - DNA, 25 bp, Probe Sequence
ttcagtgtgcctgatgtcacctcat

SEQ ID NO: 314960 - DNA, 25 bp, Probe Sequence
ttcacaagcactgttgactctgcat

SEQ ID NO: 314961 - DNA, 25 bp, Probe Sequence
ttcaaagccttaatgcagatgcact

SEQ ID NO: 314962 - DNA, 25 bp, Probe Sequence
ttcactgtcctgtgtcagagcactg

SEQ ID NO: 314963 - DNA, 25 bp, Probe Sequence
ttcactctctcacagtctgtgtcag

SEQ ID NO: 314964 - DNA, 25 bp, Probe Sequence
ttctctctcctgcagtatgagtgac

SEQ ID NO: 314965 - DNA, 25 bp, Probe Sequence
ttctcctcctgctactgtagcggac

SEQ ID NO: 314966 - DNA, 25 bp, Probe Sequence
ttctaccctgcggagatcacgctga

SEQ ID NO: 314967 - DNA, 25 bp, Probe Sequence
ttctaccatccaggcgtcaatggac

SEQ ID NO: 314968 - DNA, 25 bp, Probe Sequence
ttctatagcaccgtgggcaggaacg

SEQ ID NO: 314969 - DNA, 25 bp, Probe Sequence
ttcacaagaccgtcaagaggaccag

SEQ ID NO: 314970 - DNA, 25 bp, Probe Sequence
ttcacaagaggccgcagagaagact

SEQ ID NO: 314971 - DNA, 25 bp, Probe Sequence
ttcacccagcatcgggagaggacta

SEQ ID NO: 314972 - DNA, 25 bp, Probe Sequence
ttcactgcacacaagatgggtggtt

SEQ ID NO: 314973 - DNA, 25 bp, Probe Sequence
ttcagccacagttgtgatggttgtt

SEQ ID NO: 314974 - DNA, 25 bp, Probe Sequence
ttcagcccatcacgctgtggtttga

SEQ ID NO: 314975 - DNA, 25 bp, Probe Sequence
ttcatgcccatcgtcctagaattaa

SEQ ID NO: 314976 - DNA, 25 bp, Probe Sequence
ttcatgcccatcgtcctagaattaa

SEQ ID NO: 314977 - DNA, 25 bp, Probe Sequence
ttcaccaacacttcaaatattaaaa

SEQ ID NO: 314978 - DNA, 25 bp, Probe Sequence
ttcagcaagccacaacagttaaaaa

SEQ ID NO: 314979 - DNA, 25 bp, Probe Sequence
ttctaagatgcacaacacttatcaa

SEQ ID NO: 314980 - DNA, 25 bp, Probe Sequence
ttctttgtacacgaacttcatcctc

SEQ ID NO: 314981 - DNA, 25 bp, Probe Sequence
ttcattgctggtttaactgctcctc

SEQ ID NO: 314982 - DNA, 25 bp, Probe Sequence
ttcagtcatggcattcgcagtgccc

SEQ ID NO: 314983 - DNA, 25 bp, Probe Sequence
ttcagatgctgaccttgcggatggc

SEQ ID NO: 314984 - DNA, 25 bp, Probe Sequence
ttcagtcagttcttgcaggttgcct

SEQ ID NO: 314985 - DNA, 25 bp, Probe Sequence
ttcagtggttcttgggatctccgca

SEQ ID NO: 314986 - DNA, 25 bp, Probe Sequence
ttcagttgttcaggttcattcgtca

SEQ ID NO: 314987 - DNA, 25 bp, Probe Sequence
ttcagcctcccaggtttgatcttag

SEQ ID NO: 314988 - DNA, 25 bp, Probe Sequence
ttcagcctcagcggcagtgttctgt

SEQ ID NO: 314989 - DNA, 25 bp, Probe Sequence
ttcagcctcagcggcagtgttctgt

SEQ ID NO: 314990 - DNA, 25 bp, Probe Sequence
ttcagcattactgactgcttatgta

SEQ ID NO: 314991 - DNA, 25 bp, Probe Sequence
ttcacatccattgtctcttcatgtc

SEQ ID NO: 314992 - DNA, 25 bp, Probe Sequence
ttcactcacagtgtcactgtcagat

SEQ ID NO: 314993 - DNA, 25 bp, Probe Sequence
ttcacgcaagtttcagtgtcaaatg

SEQ ID NO: 314994 - DNA, 25 bp, Probe Sequence
ttcagccaagaatcctatcataatg

SEQ ID NO: 314995 - DNA, 25 bp, Probe Sequence
ttcacacaggaacagctatgaccat

SEQ ID NO: 314996 - DNA, 25 bp, Probe Sequence
ttcacacagggaacagctatgacca

SEQ ID NO: 314997 - DNA, 25 bp, Probe Sequence
ttcacacaggaaacagctatgacca

SEQ ID NO: 314998 - DNA, 25 bp, Probe Sequence
ttcacacaggaaacagctatgacca

SEQ ID NO: 314999 - DNA, 25 bp, Probe Sequence
ttcacacaggaaacagctatgacca

SEQ ID NO: 315000 - DNA, 25 bp, Probe Sequence
ttcacacaggaaacagctatgacca

SEQ ID NO: 315001 - DNA, 25 bp, Probe Sequence
ttcacacaggaaacagctatgacca

SEQ ID NO: 315002 - DNA, 25 bp, Probe Sequence
ttcacacaggaaacagctatgacca

SEQ ID NO: 315003 - DNA, 25 bp, Probe Sequence
ttcacacaggaaacagctatgacca

SEQ ID NO: 315004 - DNA, 25 bp, Probe Sequence
ttcacacaggaaacagctatgacca

SEQ ID NO: 315005 - DNA, 25 bp, Probe Sequence
ttcacacaggaaacagctatgacca

SEQ ID NO: 315006 - DNA, 25 bp, Probe Sequence
ttcacacaggaaacagctatgacca

SEQ ID NO: 315007 - DNA, 25 bp, Probe Sequence
ttcacacaggaaacagctatgacca

SEQ ID NO: 315008 - DNA, 25 bp, Probe Sequence
ttcacacaggaaacagctatgacca

SEQ ID NO: 315009 - DNA, 25 bp, Probe Sequence
ttcacacaggaaacagctatgacca

SEQ ID NO: 315010 - DNA, 25 bp, Probe Sequence
ttcacacaggaaacagctatgacca

SEQ ID NO: 315011 - DNA, 25 bp, Probe Sequence
ttcacacaggaaacagctatgacca

SEQ ID NO: 315012 - DNA, 25 bp, Probe Sequence
ttcacacaggaaacagctatgacca

SEQ ID NO: 315013 - DNA, 25 bp, Probe Sequence
ttcacacaggaaacagctatgacca

SEQ ID NO: 315014 - DNA, 25 bp, Probe Sequence
ttcacacaggaaacagctatgacca

SEQ ID NO: 315015 - DNA, 25 bp, Probe Sequence
ttcacacaggaaacagctatgacca

SEQ ID NO: 315016 - DNA, 25 bp, Probe Sequence
ttcacacaggaaacagctatgacca

SEQ ID NO: 315017 - DNA, 25 bp, Probe Sequence
ttcacacaggaaacagctatgacca

SEQ ID NO: 315018 - DNA, 25 bp, Probe Sequence
ttcacacaggaaacagctatgacca

SEQ ID NO: 315019 - DNA, 25 bp, Probe Sequence
ttcacacaggaaacagctatgacca

SEQ ID NO: 315020 - DNA, 25 bp, Probe Sequence
ttcacacaggaaacagctatgacca

SEQ ID NO: 315021 - DNA, 25 bp, Probe Sequence
ttcacacaggaaacagctatgacca

SEQ ID NO: 315022 - DNA, 25 bp, Probe Sequence
ttcacacaggaaacagctatgacca

SEQ ID NO: 315023 - DNA, 25 bp, Probe Sequence
ttcacacaggaaacagctatgacca

SEQ ID NO: 315024 - DNA, 25 bp, Probe Sequence
ttcacacaggaaacagctatgacca

SEQ ID NO: 315025 - DNA, 25 bp, Probe Sequence
ttcacacaggaaacagctatgacca

SEQ ID NO: 315026 - DNA, 25 bp, Probe Sequence
ttcacacaggaaacagctatgacca

SEQ ID NO: 315027 - DNA, 25 bp, Probe Sequence
ttcacacaggaaacagctatgacca

SEQ ID NO: 315028 - DNA, 25 bp, Probe Sequence
ttcacacaggaaacagctatgacca

SEQ ID NO: 315029 - DNA, 25 bp, Probe Sequence
ttcacacaggaaacagctatgacca

SEQ ID NO: 315030 - DNA, 25 bp, Probe Sequence
ttcacacaggaaacagctatgacca

SEQ ID NO: 315031 - DNA, 25 bp, Probe Sequence
ttcacacaggaaacagctatgacca

SEQ ID NO: 315032 - DNA, 25 bp, Probe Sequence
ttcacacaggaaacagctatgacca

SEQ ID NO: 315033 - DNA, 25 bp, Probe Sequence
ttcacacaggaaacagctatgacca

SEQ ID NO: 315034 - DNA, 25 bp, Probe Sequence
ttcacacaggaaacagctatgacca

SEQ ID NO: 315035 - DNA, 25 bp, Probe Sequence
ttcacacaggaaacagctatgacca

SEQ ID NO: 315036 - DNA, 25 bp, Probe Sequence
ttcacacaggaaacagctatgacca

SEQ ID NO: 315037 - DNA, 25 bp, Probe Sequence
ttcacacaggaaacagctatgacca

SEQ ID NO: 315038 - DNA, 25 bp, Probe Sequence
ttcacacaggaaacagctatgacca

SEQ ID NO: 315039 - DNA, 25 bp, Probe Sequence
ttcacacaggaaacagctatgacca

SEQ ID NO: 315040 - DNA, 25 bp, Probe Sequence
ttcacacaggaaacagctatgacca

SEQ ID NO: 315041 - DNA, 25 bp, Probe Sequence
ttcacacaggaaacagctatgacca

SEQ ID NO: 315042 - DNA, 25 bp, Probe Sequence
ttcacacaggaaacagctatgacca

SEQ ID NO: 315043 - DNA, 25 bp, Probe Sequence
ttcacacaggaaacagctatgacca

SEQ ID NO: 315044 - DNA, 25 bp, Probe Sequence
ttcacacaggaaacagctatgacca

SEQ ID NO: 315045 - DNA, 25 bp, Probe Sequence
ttcacacaggaaacagctatgacca

SEQ ID NO: 315046 - DNA, 25 bp, Probe Sequence
ttcacacaggaaacagctatgacca

SEQ ID NO: 315047 - DNA, 25 bp, Probe Sequence
ttcacacaggaaacagctatgacca

SEQ ID NO: 315048 - DNA, 25 bp, Probe Sequence
ttcacacaggaaacagctatgacca

SEQ ID NO: 315049 - DNA, 25 bp, Probe Sequence
ttcacacaggaaacagctatgacca

SEQ ID NO: 315050 - DNA, 25 bp, Probe Sequence
ttcacacaggaaacagctatgacca

SEQ ID NO: 315051 - DNA, 25 bp, Probe Sequence
ttcacacaggaaacagctatgacca

SEQ ID NO: 315052 - DNA, 25 bp, Probe Sequence
ttcacacaggaaacagctatgacca

SEQ ID NO: 315053 - DNA, 25 bp, Probe Sequence
ttcacacaggaaacagctatgacca

SEQ ID NO: 315054 - DNA, 25 bp, Probe Sequence
ttcacacaggaaacagctatgacca

SEQ ID NO: 315055 - DNA, 25 bp, Probe Sequence
ttcacacaggaaacagctatgacca

SEQ ID NO: 315056 - DNA, 25 bp, Probe Sequence
ttcacacaggaaacagctatgacca

SEQ ID NO: 315057 - DNA, 25 bp, Probe Sequence
ttcacacaggaaacagctatgacca

SEQ ID NO: 315058 - DNA, 25 bp, Probe Sequence
ttcacacaggaaacagctatgacca

SEQ ID NO: 315059 - DNA, 25 bp, Probe Sequence
ttcacacaggaaacagctatgacca

SEQ ID NO: 315060 - DNA, 25 bp, Probe Sequence
ttcacacaggaaacagctatgacca

SEQ ID NO: 315061 - DNA, 25 bp, Probe Sequence
ttcacacaggaaacagctatgacca

SEQ ID NO: 315062 - DNA, 25 bp, Probe Sequence
ttcacacaggaaacagctatgacca

SEQ ID NO: 315063 - DNA, 25 bp, Probe Sequence
ttcacacaggaaacagctatgacca

SEQ ID NO: 315064 - DNA, 25 bp, Probe Sequence
ttcacacaggaaacagctatgacca

SEQ ID NO: 315065 - DNA, 25 bp, Probe Sequence
ttcacacaggaaacagctatgacca

SEQ ID NO: 315066 - DNA, 25 bp, Probe Sequence
ttcacacaggaaacagctatgacca

SEQ ID NO: 315067 - DNA, 25 bp, Probe Sequence
ttcacacaggaaacagctatgacca

SEQ ID NO: 315068 - DNA, 25 bp, Probe Sequence
ttcacacaggaaacagctatgacca

SEQ ID NO: 315069 - DNA, 25 bp, Probe Sequence
ttcacacaggaaacagctatgacca

SEQ ID NO: 315070 - DNA, 25 bp, Probe Sequence
ttcacacaggaaacagctatgacca

SEQ ID NO: 315071 - DNA, 25 bp, Probe Sequence
ttcacacaggaaacagctatgacca

SEQ ID NO: 315072 - DNA, 25 bp, Probe Sequence
ttcacacaggaaacagctatgacca

SEQ ID NO: 315073 - DNA, 25 bp, Probe Sequence
ttcacacaggaaacagctatgacca

SEQ ID NO: 315074 - DNA, 25 bp, Probe Sequence
ttcacacaggaaacagctatgacca

SEQ ID NO: 315075 - DNA, 25 bp, Probe Sequence
ttcacacaggaaacagctatgacca

SEQ ID NO: 315076 - DNA, 25 bp, Probe Sequence
ttcacacaggaaacagctatgacca

SEQ ID NO: 315077 - DNA, 25 bp, Probe Sequence
ttcacacaggaaacagctatgacca

SEQ ID NO: 315078 - DNA, 25 bp, Probe Sequence
ttcacacaggaaacagctatgacca

SEQ ID NO: 315079 - DNA, 25 bp, Probe Sequence
ttcacccagagctcagcctgagata

SEQ ID NO: 315080 - DNA, 25 bp, Probe Sequence
ttcaccctagcctgactggaagcag

SEQ ID NO: 315081 - DNA, 25 bp, Probe Sequence
ttcaccccagagggtcgggcaggtt

SEQ ID NO: 315082 - DNA, 25 bp, Probe Sequence
ttcaccgtctgaaggtaggggaagg

SEQ ID NO: 315083 - DNA, 25 bp, Probe Sequence
ttctcttttgcccgtaggtgggagg

SEQ ID NO: 315084 - DNA, 25 bp, Probe Sequence
ttcttttctcccatattggcatgga

SEQ ID NO: 315085 - DNA, 25 bp, Probe Sequence
ttctcttattcgtgttaggtgcccc

SEQ ID NO: 315086 - DNA, 25 bp, Probe Sequence
ttctttataaagcctgtaggttctt

SEQ ID NO: 315087 - DNA, 25 bp, Probe Sequence
ttcatccattattagcctggggtgt

SEQ ID NO: 315088 - DNA, 25 bp, Probe Sequence
ttcatctcaacatcggctggtggtt

SEQ ID NO: 315089 - DNA, 25 bp, Probe Sequence
ttcacatcccaacagggtctgcttg

SEQ ID NO: 315090 - DNA, 25 bp, Probe Sequence
ttcactcccaaaatgaggcttttct

SEQ ID NO: 315091 - DNA, 25 bp, Probe Sequence
ttcagctttgcatcacgagtcttgt

SEQ ID NO: 315092 - DNA, 25 bp, Probe Sequence
ttcagcaaatattcactggcacctg

SEQ ID NO: 315093 - DNA, 25 bp, Probe Sequence
ttcagcatcctttatctgtgacttc

SEQ ID NO: 315094 - DNA, 25 bp, Probe Sequence
ttcacatcactccatttctactgag

SEQ ID NO: 315095 - DNA, 25 bp, Probe Sequence
ttcactagctcatgtaaactgcaga

SEQ ID NO: 315096 - DNA, 25 bp, Probe Sequence
ttcactatcttcgagagaacagaga

SEQ ID NO: 315097 - DNA, 25 bp, Probe Sequence
ttcatctacagtacatggaagggac

SEQ ID NO: 315098 - DNA, 25 bp, Probe Sequence
ttcatcttgcacactggaagagagt

SEQ ID NO: 315099 - DNA, 25 bp, Probe Sequence
ttcatcttcagcactggaaacgaat

SEQ ID NO: 315100 - DNA, 25 bp, Probe Sequence
ttcatttgagcctccaaactacata

SEQ ID NO: 315101 - DNA, 25 bp, Probe Sequence
ttgacttgcacctataaaattaatg

SEQ ID NO: 315102 - DNA, 25 bp, Probe Sequence
ttcagttacaccaaaaattaatatt

SEQ ID NO: 315103 - DNA, 25 bp, Probe Sequence
ttcagaaaacctccaaagtagatgt

SEQ ID NO: 315104 - DNA, 25 bp, Probe Sequence
ttcagagaactttgcctacagtaaa

SEQ ID NO: 315105 - DNA, 25 bp, Probe Sequence
ttcagagaactttcactcacagtag

SEQ ID NO: 315106 - DNA, 25 bp, Probe Sequence
ttcttatgagtctcactagattgac

SEQ ID NO: 315107 - DNA, 25 bp, Probe Sequence
ttcgtgaggtcatgcacaagaagac

SEQ ID NO: 315108 - DNA, 25 bp, Probe Sequence
ttcctgcaggcggagactgacaaac

SEQ ID NO: 315109 - DNA, 25 bp, Probe Sequence
ttcagctggacgggaaagtgaagcc

SEQ ID NO: 315110 - DNA, 25 bp, Probe Sequence
ttcaggtacagcagagataaaactc

SEQ ID NO: 315111 - DNA, 25 bp, Probe Sequence
ttcagcttcacggtgatgaaaaacc

SEQ ID NO: 315112 - DNA, 25 bp, Probe Sequence
ttcagcttcacggtgatgaaaaacc

SEQ ID NO: 315113 - DNA, 25 bp, Probe Sequence
ttcacttcgctagtaagaacccctc

SEQ ID NO: 315114 - DNA, 25 bp, Probe Sequence
ttgcactaccttcaagaaaaccttg

SEQ ID NO: 315115 - DNA, 25 bp, Probe Sequence
ttcctacctgtctgatataaacttt

SEQ ID NO: 315116 - DNA, 25 bp, Probe Sequence
ttcactacactgccttacataaacc

SEQ ID NO: 315117 - DNA, 25 bp, Probe Sequence
ttcactacctattctgacaaccagc

SEQ ID NO: 315118 - DNA, 25 bp, Probe Sequence
ttcactgaggccactacacatctga

SEQ ID NO: 315119 - DNA, 25 bp, Probe Sequence
ttcagtgaatcctcctaatctgttt

SEQ ID NO: 315120 - DNA, 25 bp, Probe Sequence
ttcactatacttttctaactgagtt

SEQ ID NO: 315121 - DNA, 25 bp, Probe Sequence
ttcacttacttagtcactttgccta

SEQ ID NO: 315122 - DNA, 25 bp, Probe Sequence
ttcacggaatgttacaatgttacta

SEQ ID NO: 315123 - DNA, 25 bp, Probe Sequence
ttcagcttaactgacagatgttaaa

SEQ ID NO: 315124 - DNA, 25 bp, Probe Sequence
ttcactacagactaaggtcattata

SEQ ID NO: 315125 - DNA, 25 bp, Probe Sequence
ttcaccaacacagtagttttgtatt

SEQ ID NO: 315126 - DNA, 25 bp, Probe Sequence
ttcacctattcatgagtattattga

SEQ ID NO: 315127 - DNA, 25 bp, Probe Sequence
ttcacctattaccagtgttccctgg

SEQ ID NO: 315128 - DNA, 25 bp, Probe Sequence
ttcccgttagggacatcacaccctg

SEQ ID NO: 315129 - DNA, 25 bp, Probe Sequence
ttcaccagcttacaactcaaaccgg

SEQ ID NO: 315130 - DNA, 25 bp, Probe Sequence
ttgaccttgtaggggccatagacca

SEQ ID NO: 315131 - DNA, 25 bp, Probe Sequence
ttgtttttcaggggcctgaggctcc

SEQ ID NO: 315132 - DNA, 25 bp, Probe Sequence
ttcttgtaaaggcgtctgacagtcc

SEQ ID NO: 315133 - DNA, 25 bp, Probe Sequence
ttcgatgctcagacaggggccgaca

SEQ ID NO: 315134 - DNA, 25 bp, Probe Sequence
ttcagatctcatagatgacccccag

SEQ ID NO: 315135 - DNA, 25 bp, Probe Sequence
ttcagcatatcaagagcacttccaa

SEQ ID NO: 315136 - DNA, 25 bp, Probe Sequence
ttcactccatcaagatctgccaatc

SEQ ID NO: 315137 - DNA, 25 bp, Probe Sequence
ttcacttcatgctgatgatgtatca

SEQ ID NO: 315138 - DNA, 25 bp, Probe Sequence
ttcacttcatgctgatgatgtatca

SEQ ID NO: 315139 - DNA, 25 bp, Probe Sequence
ttcacttctgcaatagctttcattt

SEQ ID NO: 315140 - DNA, 25 bp, Probe Sequence
ttcactcctgtttcatgttcactgg

SEQ ID NO: 315141 - DNA, 25 bp, Probe Sequence
ttcatctctcagattacttcattgt

SEQ ID NO: 315142 - DNA, 25 bp, Probe Sequence
ttcacatagagagtgtacccaatat

SEQ ID NO: 315143 - DNA, 25 bp, Probe Sequence
ttcaccaggagtacattccatctca

SEQ ID NO: 315144 - DNA, 25 bp, Probe Sequence
ttcaccagtagaccatgcctgacca

SEQ ID NO: 315145 - DNA, 25 bp, Probe Sequence
ttcacggaggcacatgtcgacgcca

SEQ ID NO: 315146 - DNA, 25 bp, Probe Sequence
ttcacgggcctgtactgtgagagcc

SEQ ID NO: 315147 - DNA, 25 bp, Probe Sequence
ttcatccaggcccaactgtgagcaa

SEQ ID NO: 315148 - DNA, 25 bp, Probe Sequence
ttcaccaccttcactgtgacgaaat

SEQ ID NO: 315149 - DNA, 25 bp, Probe Sequence
ttcactccagcctgggtgacaaagt

SEQ ID NO: 315150 - DNA, 25 bp, Probe Sequence
ttcactccaaaattgtgtgagccaa

SEQ ID NO: 315151 - DNA, 25 bp, Probe Sequence
ttcattcctgtacagctgggccaaa

SEQ ID NO: 315152 - DNA, 25 bp, Probe Sequence
ttcattcctgtacagctgggccaaa

SEQ ID NO: 315153 - DNA, 25 bp, Probe Sequence
ttcacccttcatccattggctggaa

SEQ ID NO: 315154 - DNA, 25 bp, Probe Sequence
ttcaccacccagccgctggaggaag

SEQ ID NO: 315155 - DNA, 25 bp, Probe Sequence
ttcaccacccagccgctggaggaag

SEQ ID NO: 315156 - DNA, 25 bp, Probe Sequence
ttcacccgctcactggctgagagcg

SEQ ID NO: 315157 - DNA, 25 bp, Probe Sequence
ttctccctctcactgtctgagagtt

SEQ ID NO: 315158 - DNA, 25 bp, Probe Sequence
ttcttgcctctatttcttagttgga

SEQ ID NO: 315159 - DNA, 25 bp, Probe Sequence
ttcgagccttacactctatctcgtg

SEQ ID NO: 315160 - DNA, 25 bp, Probe Sequence
ttcgactggtccagctctgacatcc

SEQ ID NO: 315161 - DNA, 25 bp, Probe Sequence
ttcagtgctggtgccagcctgaccg

SEQ ID NO: 315162 - DNA, 25 bp, Probe Sequence
ttcagggcaatgaccactctgccac

SEQ ID NO: 315163 - DNA, 25 bp, Probe Sequence
ttcagggacatgagcaccgagcgca

SEQ ID NO: 315164 - DNA, 25 bp, Probe Sequence
ttcagtctgtcgtgcaccgatgaga

SEQ ID NO: 315165 - DNA, 25 bp, Probe Sequence
ttcaggcgtggatgccgcatatgaa

SEQ ID NO: 315166 - DNA, 25 bp, Probe Sequence
ttcagtgcactggcaagcgagatga

SEQ ID NO: 315167 - DNA, 25 bp, Probe Sequence
ttcaggcagctccaaggaaggtgtt

SEQ ID NO: 315168 - DNA, 25 bp, Probe Sequence
ttcagagcagctgccacaactggcc

SEQ ID NO: 315169 - DNA, 25 bp, Probe Sequence
ttcatctgcactgccaagactgagt

SEQ ID NO: 315170 - DNA, 25 bp, Probe Sequence
ttcatcaatcatgcctatttaatgg

SEQ ID NO: 315171 - DNA, 25 bp, Probe Sequence
ttcatccatgctgcctttcaaagca

SEQ ID NO: 315172 - DNA, 25 bp, Probe Sequence
ttctccgcattggcattgtccaaga

SEQ ID NO: 315173 - DNA, 25 bp, Probe Sequence
ttcctagcttccttgcttcagaatt

SEQ ID NO: 315174 - DNA, 25 bp, Probe Sequence
ttcattggttcctttgatagccatt

SEQ ID NO: 315175 - DNA, 25 bp, Probe Sequence
ttcttggaggcctctgtaacgttac

SEQ ID NO: 315176 - DNA, 25 bp, Probe Sequence
ttcttgggtcactctctagaccaac

SEQ ID NO: 315177 - DNA, 25 bp, Probe Sequence
ttctgtaagtcctccatacaccata

SEQ ID NO: 315178 - DNA, 25 bp, Probe Sequence
ttcattaagaccttctgacaccctg

SEQ ID NO: 315179 - DNA, 25 bp, Probe Sequence
ttcttcaaactctcagaaatcctga

SEQ ID NO: 315180 - DNA, 25 bp, Probe Sequence
ttcttgatactttccaaattctctg

SEQ ID NO: 315181 - DNA, 25 bp, Probe Sequence
ttcttttgcttaggaaattgctcat

SEQ ID NO: 315182 - DNA, 25 bp, Probe Sequence
ttcttatgtgtttcttcaagtctct

SEQ ID NO: 315183 - DNA, 25 bp, Probe Sequence
ttctataatgtgttattcaacttct

SEQ ID NO: 315184 - DNA, 25 bp, Probe Sequence
ttctagtatttgtattgcaattttg

SEQ ID NO: 315185 - DNA, 25 bp, Probe Sequence
ttcttgatagtttgcaggcaaaaca

SEQ ID NO: 315186 - DNA, 25 bp, Probe Sequence
ttctggattcaaacaggcaacaatg

SEQ ID NO: 315187 - DNA, 25 bp, Probe Sequence
ttctggattcaaacaggcaacaatg

SEQ ID NO: 315188 - DNA, 25 bp, Probe Sequence
ttctggattcaaacaggcaacaatg

SEQ ID NO: 315189 - DNA, 25 bp, Probe Sequence
ttcttgattttaaagcaacaggcct

SEQ ID NO: 315190 - DNA, 25 bp, Probe Sequence
ttcactgctttttcaccaaagtcgt

SEQ ID NO: 315191 - DNA, 25 bp, Probe Sequence
ttcagtgcttttttccatttgtcga

SEQ ID NO: 315192 - DNA, 25 bp, Probe Sequence
ttgcacctcctttttttagtcgaga

SEQ ID NO: 315193 - DNA, 25 bp, Probe Sequence
ttgcacctcctttttttagtcgaga

SEQ ID NO: 315194 - DNA, 25 bp, Probe Sequence
ttcagctcccatatttttagacaga

SEQ ID NO: 315195 - DNA, 25 bp, Probe Sequence
ttcatgacccttttattgtatacaa

SEQ ID NO: 315196 - DNA, 25 bp, Probe Sequence
ttcatcatccatcttaattggcata

SEQ ID NO: 315197 - DNA, 25 bp, Probe Sequence
ttcttcctgttctagcaatctgcaa

SEQ ID NO: 315198 - DNA, 25 bp, Probe Sequence
ttcattcctttcagccatcgtcctt

SEQ ID NO: 315199 - DNA, 25 bp, Probe Sequence
ttcctgcccagaaagccacaggcca

SEQ ID NO: 315200 - DNA, 25 bp, Probe Sequence
ttcctgcccagaaagccacaggcca

SEQ ID NO: 315201 - DNA, 25 bp, Probe Sequence
ttcagtgcccaatgaggcaggagaa

SEQ ID NO: 315202 - DNA, 25 bp, Probe Sequence
ttccctccaaccgtgaggaaaatcg

SEQ ID NO: 315203 - DNA, 25 bp, Probe Sequence
ttctcacttccaacttaggaccaac

SEQ ID NO: 315204 - DNA, 25 bp, Probe Sequence
ttctccattcccagtgggatcccag

SEQ ID NO: 315205 - DNA, 25 bp, Probe Sequence
ttctcaatacctgacaggggcccat

SEQ ID NO: 315206 - DNA, 25 bp, Probe Sequence
ttctactcctctgacgaatgggtat

SEQ ID NO: 315207 - DNA, 25 bp, Probe Sequence
ttctttctcctataaatgaggataa

SEQ ID NO: 315208 - DNA, 25 bp, Probe Sequence
ttcttttcccaatgtaggtatgaag

SEQ ID NO: 315209 - DNA, 25 bp, Probe Sequence
ttctttacccaaactacttctagat

SEQ ID NO: 315210 - DNA, 25 bp, Probe Sequence
ttcatatttgaccagattctactac

SEQ ID NO: 315211 - DNA, 25 bp, Probe Sequence
ttcatatgtaatccgcgtctacacc

SEQ ID NO: 315212 - DNA, 25 bp, Probe Sequence
ttcatagtatatctctgtccccaaa

SEQ ID NO: 315213 - DNA, 25 bp, Probe Sequence
ttcataattatcaatagccccaagc

SEQ ID NO: 315214 - DNA, 25 bp, Probe Sequence
ttcatagcactatatcgagtacata

SEQ ID NO: 315215 - DNA, 25 bp, Probe Sequence
ttcatgccactgaatacgttgaaaa

SEQ ID NO: 315216 - DNA, 25 bp, Probe Sequence
ttctgcgcttgatttggggaatatt

SEQ ID NO: 315217 - DNA, 25 bp, Probe Sequence
ttctggcttgactggatggaaggag

SEQ ID NO: 315218 - DNA, 25 bp, Probe Sequence
ttctggtccagcgcaaggaggggct

SEQ ID NO: 315219 - DNA, 25 bp, Probe Sequence
ttctgcctactgagcaaggttgggt

SEQ ID NO: 315220 - DNA, 25 bp, Probe Sequence
ttcttcttcgcagacagcgttcggc

SEQ ID NO: 315221 - DNA, 25 bp, Probe Sequence
ttctcttctgccgtcagagtttcag

SEQ ID NO: 315222 - DNA, 25 bp, Probe Sequence
ttcattttgcctttgttcttgcagg

SEQ ID NO: 315223 - DNA, 25 bp, Probe Sequence
ttcctaatcttcttggtcgtgcaga

SEQ ID NO: 315224 - DNA, 25 bp, Probe Sequence
ttcttgattccttctggtcctataa

SEQ ID NO: 315225 - DNA, 25 bp, Probe Sequence
ttctgtcttcctttgctaacttagg

SEQ ID NO: 315226 - DNA, 25 bp, Probe Sequence
ttcttcctcacctatgtaatttcag

SEQ ID NO: 315227 - DNA, 25 bp, Probe Sequence
ttcatcccatctactttattttcat

SEQ ID NO: 315228 - DNA, 25 bp, Probe Sequence
ttcatcaagataaggcatttctttc

SEQ ID NO: 315229 - DNA, 25 bp, Probe Sequence
ttctatactgcaagtcttttgatag

SEQ ID NO: 315230 - DNA, 25 bp, Probe Sequence
ttcttattgcaaatactggtatgga

SEQ ID NO: 315231 - DNA, 25 bp, Probe Sequence
ttcttgtgcgcacacttgatgaagg

SEQ ID NO: 315232 - DNA, 25 bp, Probe Sequence
ttcatatgtccctcgtgaggctgga

SEQ ID NO: 315233 - DNA, 25 bp, Probe Sequence
ttgcttgaacccaggaggcggaggt

SEQ ID NO: 315234 - DNA, 25 bp, Probe Sequence
ttcttcacaccctgcaagggctggg

SEQ ID NO: 315235 - DNA, 25 bp, Probe Sequence
ttcttgccctaccataagggctgaa

SEQ ID NO: 315236 - DNA, 25 bp, Probe Sequence
ttcttctctaaagaagcggctgaat

SEQ ID NO: 315237 - DNA, 25 bp, Probe Sequence
ttcatctctatttaaaggaacgaaa

SEQ ID NO: 315238 - DNA, 25 bp, Probe Sequence
ttctgcatcttataatggtaaccaa

SEQ ID NO: 315239 - DNA, 25 bp, Probe Sequence
ttcagctttgacgcagactacctaa

SEQ ID NO: 315240 - DNA, 25 bp, Probe Sequence
ttcatttatactttgataacctgta

SEQ ID NO: 315241 - DNA, 25 bp, Probe Sequence
ttcatctctaaccctaagaccattc

SEQ ID NO: 315242 - DNA, 25 bp, Probe Sequence
ttcagctgttaatgctgggatccat

SEQ ID NO: 315243 - DNA, 25 bp, Probe Sequence
ttctgctttcacacggcagtgtgct

SEQ ID NO: 315244 - DNA, 25 bp, Probe Sequence
ttctgtccccagggagcagactgtg

SEQ ID NO: 315245 - DNA, 25 bp, Probe Sequence
ttcttcctcctgcggcagagttgtt

SEQ ID NO: 315246 - DNA, 25 bp, Probe Sequence
ttcctggctagcaaagggatttgtt

SEQ ID NO: 315247 - DNA, 25 bp, Probe Sequence
ttcttggctgcatgaaggttttctt

SEQ ID NO: 315248 - DNA, 25 bp, Probe Sequence
ttctatggcgtttgtagttgtgtct

SEQ ID NO: 315249 - DNA, 25 bp, Probe Sequence
ttcttgagagcctgtagatttcttg

SEQ ID NO: 315250 - DNA, 25 bp, Probe Sequence
ttctcacgatggtgagtgagttctc

SEQ ID NO: 315251 - DNA, 25 bp, Probe Sequence
ttctcactgcatataagagttatgt

SEQ ID NO: 315252 - DNA, 25 bp, Probe Sequence
ttcatgcacttaaagaagtattttt

SEQ ID NO: 315253 - DNA, 25 bp, Probe Sequence
ttctacctaagtcagctttcatctt

SEQ ID NO: 315254 - DNA, 25 bp, Probe Sequence
ttctaatctctgttccagtttcctt

SEQ ID NO: 315255 - DNA, 25 bp, Probe Sequence
ttctagtttgtatatgtttccatct

SEQ ID NO: 315256 - DNA, 25 bp, Probe Sequence
ttctactgggtatatttcaagcatt

SEQ ID NO: 315257 - DNA, 25 bp, Probe Sequence
ttctactgggtatatttcaagcatt

SEQ ID NO: 315258 - DNA, 25 bp, Probe Sequence
ttgtcacggattagttgtacaacta

SEQ ID NO: 315259 - DNA, 25 bp, Probe Sequence
ttctcaggagttgcttgtacattct

SEQ ID NO: 315260 - DNA, 25 bp, Probe Sequence
ttcttgggcctggcagattcacctc

SEQ ID NO: 315261 - DNA, 25 bp, Probe Sequence
ttcattgtggccatggttagctccc

SEQ ID NO: 315262 - DNA, 25 bp, Probe Sequence
ttcttatcgcaattggattacatcc

SEQ ID NO: 315263 - DNA, 25 bp, Probe Sequence
ttctatctccagtaggcctaatgct

SEQ ID NO: 315264 - DNA, 25 bp, Probe Sequence
ttcatcttgaggtggccaatatggg

SEQ ID NO: 315265 - DNA, 25 bp, Probe Sequence
ttcatgatttagtcctcagaaatgg

SEQ ID NO: 315266 - DNA, 25 bp, Probe Sequence
ttcattcatgtctgcctcaaattgc

SEQ ID NO: 315267 - DNA, 25 bp, Probe Sequence
ttcagtctgatgttccgcaatttta

SEQ ID NO: 315268 - DNA, 25 bp, Probe Sequence
ttcatgcctgtaatccagcactttg

SEQ ID NO: 315269 - DNA, 25 bp, Probe Sequence
ttcagacttatcaccattcttatgt

SEQ ID NO: 315270 - DNA, 25 bp, Probe Sequence
ttcaccttcatatcctgatcttaga

SEQ ID NO: 315271 - DNA, 25 bp, Probe Sequence
ttcatctctttttccatgatctacc

SEQ ID NO: 315272 - DNA, 25 bp, Probe Sequence
ttcagccttatgttacagatgctct

SEQ ID NO: 315273 - DNA, 25 bp, Probe Sequence
ttcagctcttggatatagcagcaat

SEQ ID NO: 315274 - DNA, 25 bp, Probe Sequence
ttcagcagctgaagattaatgcaga

SEQ ID NO: 315275 - DNA, 25 bp, Probe Sequence
ttcaggatgaagttggtgcagtggc

SEQ ID NO: 315276 - DNA, 25 bp, Probe Sequence
ttcggcatgacattgatcgccgtag

SEQ ID NO: 315277 - DNA, 25 bp, Probe Sequence
ttcagtggatcatcacagtttgagt

SEQ ID NO: 315278 - DNA, 25 bp, Probe Sequence
ttcagctgattcttgacagatttag

SEQ ID NO: 315279 - DNA, 25 bp, Probe Sequence
ttcagctgcttggtgtagagttgat

SEQ ID NO: 315280 - DNA, 25 bp, Probe Sequence
ttcatgctgtgtgctggacgctgga

SEQ ID NO: 315281 - DNA, 25 bp, Probe Sequence
ttctctttactgccacaggctaaga

SEQ ID NO: 315282 - DNA, 25 bp, Probe Sequence
ttcattcctgccccaagtgtggaga

SEQ ID NO: 315283 - DNA, 25 bp, Probe Sequence
ttcattcctgccccaagtgtggaga

SEQ ID NO: 315284 - DNA, 25 bp, Probe Sequence
ttcttcgctgcctgatgaggggaaa

SEQ ID NO: 315285 - DNA, 25 bp, Probe Sequence
ttcttcggccctacaggtcagaatg

SEQ ID NO: 315286 - DNA, 25 bp, Probe Sequence
ttcttcggccctacaggtcagaatg

SEQ ID NO: 315287 - DNA, 25 bp, Probe Sequence
ttctttctccctgatggacagaccc

SEQ ID NO: 315288 - DNA, 25 bp, Probe Sequence
ttctttccctccaagtgataacctt

SEQ ID NO: 315289 - DNA, 25 bp, Probe Sequence
ttctttccctagaggcaaacatttc

SEQ ID NO: 315290 - DNA, 25 bp, Probe Sequence
ttcttcccattgcgggcaggaaggt

SEQ ID NO: 315291 - DNA, 25 bp, Probe Sequence
ttcttcatccttccggacaagggga

SEQ ID NO: 315292 - DNA, 25 bp, Probe Sequence
ttcgatcttcataacggacaaactg

SEQ ID NO: 315293 - DNA, 25 bp, Probe Sequence
ttcagtcttcaatctgttttgagct

SEQ ID NO: 315294 - DNA, 25 bp, Probe Sequence
ttcagcctatacttttccatatggt

SEQ ID NO: 315295 - DNA, 25 bp, Probe Sequence
ttcgcgtaagcattgttgttctgtt

SEQ ID NO: 315296 - DNA, 25 bp, Probe Sequence
ttccagttccaaaatgattccattc

SEQ ID NO: 315297 - DNA, 25 bp, Probe Sequence
ttccagttccaaaatgattccattc

SEQ ID NO: 315298 - DNA, 25 bp, Probe Sequence
ttctactttcaatatttcgttccaa

SEQ ID NO: 315299 - DNA, 25 bp, Probe Sequence
ttctactttcaatatttcgttccaa

SEQ ID NO: 315300 - DNA, 25 bp, Probe Sequence
ttctacttccaagacttattttcac

SEQ ID NO: 315301 - DNA, 25 bp, Probe Sequence
ttctttttccactccatagtttcat

SEQ ID NO: 315302 - DNA, 25 bp, Probe Sequence
ttcgttttctctcatctgaatttac

SEQ ID NO: 315303 - DNA, 25 bp, Probe Sequence
ttcaggtcccctttcagagatataa

SEQ ID NO: 315304 - DNA, 25 bp, Probe Sequence
ttcagagtctaccttaccatatata

SEQ ID NO: 315305 - DNA, 25 bp, Probe Sequence
ttctattcatagcttatccttcaga

SEQ ID NO: 315306 - DNA, 25 bp, Probe Sequence
ttctagtaagcactaatccttaaaa

SEQ ID NO: 315307 - DNA, 25 bp, Probe Sequence
ttcttttaatccaatccactaacac

SEQ ID NO: 315308 - DNA, 25 bp, Probe Sequence
ttctttctgatctgccatcgcagta

SEQ ID NO: 315309 - DNA, 25 bp, Probe Sequence
ttctttgctgcgtctactgcgagaa

SEQ ID NO: 315310 - DNA, 25 bp, Probe Sequence
ttcattcttgatttactctaaacac

SEQ ID NO: 315311 - DNA, 25 bp, Probe Sequence
ttcatacttcaactaattaaagatt

SEQ ID NO: 315312 - DNA, 25 bp, Probe Sequence
ttctactttcagaaactaaatgact

SEQ ID NO: 315313 - DNA, 25 bp, Probe Sequence
ttcttttatcactacctcaactgag

SEQ ID NO: 315314 - DNA, 25 bp, Probe Sequence
ttcttgattcccaattctcaactct

SEQ ID NO: 315315 - DNA, 25 bp, Probe Sequence
ttcggatcttctgtcccagatcctg

SEQ ID NO: 315316 - DNA, 25 bp, Probe Sequence
ttgccttaatatgtcccaggacccc

SEQ ID NO: 315317 - DNA, 25 bp, Probe Sequence
ttcatcgtaaacaccaacgtgcccc

SEQ ID NO: 315318 - DNA, 25 bp, Probe Sequence
ttgacctaaacatgtaaccatgccc

SEQ ID NO: 315319 - DNA, 25 bp, Probe Sequence
ttgtagctaaacatttcattgtccc

SEQ ID NO: 315320 - DNA, 25 bp, Probe Sequence
ttcttgtatagactagttatttccc

SEQ ID NO: 315321 - DNA, 25 bp, Probe Sequence
ttctggtagaagagtttgtcccaca

SEQ ID NO: 315322 - DNA, 25 bp, Probe Sequence
ttctttgaaaaccttttctatcatc

SEQ ID NO: 315323 - DNA, 25 bp, Probe Sequence
ttcttgatagaaacctgcttacatt

SEQ ID NO: 315324 - DNA, 25 bp, Probe Sequence
ttcttgcaaagtatccctactgtaa

SEQ ID NO: 315325 - DNA, 25 bp, Probe Sequence
ttgttggggagttcctggaagtgac

SEQ ID NO: 315326 - DNA, 25 bp, Probe Sequence
ttgtgtgggggatccaaagaagaca

SEQ ID NO: 315327 - DNA, 25 bp, Probe Sequence
ttggtggtcctgcaccaaactacaa

SEQ ID NO: 315328 - DNA, 25 bp, Probe Sequence
ttgggagtcagccggccaaactaac

SEQ ID NO: 315329 - DNA, 25 bp, Probe Sequence
ttctgaagtctgagcccatttctgg

SEQ ID NO: 315330 - DNA, 25 bp, Probe Sequence
ttcagggtttggtctatctcattgg

SEQ ID NO: 315331 - DNA, 25 bp, Probe Sequence
ttcatggttttgttgccacaagatg

SEQ ID NO: 315332 - DNA, 25 bp, Probe Sequence
ttcaggatttggtctctctctaatt

SEQ ID NO: 315333 - DNA, 25 bp, Probe Sequence
ttcagagattatgcattcttcatga

SEQ ID NO: 315334 - DNA, 25 bp, Probe Sequence
ttcagagtactgtttttagatgtga

SEQ ID NO: 315335 - DNA, 25 bp, Probe Sequence
ttcagactctcttgcttttttgtga

SEQ ID NO: 315336 - DNA, 25 bp, Probe Sequence
ttcagcacctgcttttgtttctgtg

SEQ ID NO: 315337 - DNA, 25 bp, Probe Sequence
ttcagaactcattttggtggtggca

SEQ ID NO: 315338 - DNA, 25 bp, Probe Sequence
ttcagaactcattttggtggtggca

SEQ ID NO: 315339 - DNA, 25 bp, Probe Sequence
ttcgaggccattgcgttggtggaga

SEQ ID NO: 315340 - DNA, 25 bp, Probe Sequence
ttctatggagccatctgctttgggg

SEQ ID NO: 315341 - DNA, 25 bp, Probe Sequence
ttctagggtcttactctttgtatga

SEQ ID NO: 315342 - DNA, 25 bp, Probe Sequence
ttctaatggtgcttactttattgaa

SEQ ID NO: 315343 - DNA, 25 bp, Probe Sequence
ttctgattgggcctaagctctacga

SEQ ID NO: 315344 - DNA, 25 bp, Probe Sequence
ttcagttgagggcaagtctctggaa

SEQ ID NO: 315345 - DNA, 25 bp, Probe Sequence
ttcgcctgggagcagttccgaaatg

SEQ ID NO: 315346 - DNA, 25 bp, Probe Sequence
ttcccggatagcaacctcgggacag

SEQ ID NO: 315347 - DNA, 25 bp, Probe Sequence
ttctccagctgatcaacccggggag

SEQ ID NO: 315348 - DNA, 25 bp, Probe Sequence
ttctaagtaaaaccacagcagttga

SEQ ID NO: 315349 - DNA, 25 bp, Probe Sequence
ttgctacgaacaaaacgcagcgcat

SEQ ID NO: 315350 - DNA, 25 bp, Probe Sequence
ttctgagcaaaagaccacagctgaa

SEQ ID NO: 315351 - DNA, 25 bp, Probe Sequence
ttcccagataagcagcccaggaaga

SEQ ID NO: 315352 - DNA, 25 bp, Probe Sequence
ttcctgaaagagtccctcagaggag

SEQ ID NO: 315353 - DNA, 25 bp, Probe Sequence
ttctcaaagaaggacccaggtggga

SEQ ID NO: 315354 - DNA, 25 bp, Probe Sequence
ttctaaaatgtcacccaaggccagg

SEQ ID NO: 315355 - DNA, 25 bp, Probe Sequence
ttctaagaattaaccctctcctgct

SEQ ID NO: 315356 - DNA, 25 bp, Probe Sequence
ttctagggaactatccttccttgcc

SEQ ID NO: 315357 - DNA, 25 bp, Probe Sequence
ttcttgttaatccttctttcctgga

SEQ ID NO: 315358 - DNA, 25 bp, Probe Sequence
ttcattttatcccttatatttctaa

SEQ ID NO: 315359 - DNA, 25 bp, Probe Sequence
ttcatgcgttcccgtatatttgtct

SEQ ID NO: 315360 - DNA, 25 bp, Probe Sequence
ttctcagtatcagcccatggtttca

SEQ ID NO: 315361 - DNA, 25 bp, Probe Sequence
ttcttgtaagcccctgaagttcagt

SEQ ID NO: 315362 - DNA, 25 bp, Probe Sequence
ttcgtgatagagggacatgggtgga

SEQ ID NO: 315363 - DNA, 25 bp, Probe Sequence
ttctttagatgtcgtatccggagag

SEQ ID NO: 315364 - DNA, 25 bp, Probe Sequence
ttcttttgaggcatgcacatctgga

SEQ ID NO: 315365 - DNA, 25 bp, Probe Sequence
ttctatttgggcaagagatgcgctt

SEQ ID NO: 315366 - DNA, 25 bp, Probe Sequence
ttctatctctaggcaacatgtcttt

SEQ ID NO: 315367 - DNA, 25 bp, Probe Sequence
ttcttctttgacttatgagttattt

SEQ ID NO: 315368 - DNA, 25 bp, Probe Sequence
ttctcccaagatttatagttacgtc

SEQ ID NO: 315369 - DNA, 25 bp, Probe Sequence
ttcttaaagcaatctatgtaactgt

SEQ ID NO: 315370 - DNA, 25 bp, Probe Sequence
ttcattaaagcatctgagatctaag

SEQ ID NO: 315371 - DNA, 25 bp, Probe Sequence
ttctctaaacacctgactctaggac

SEQ ID NO: 315372 - DNA, 25 bp, Probe Sequence
ttcttcaaacagatgtcctggatga

SEQ ID NO: 315373 - DNA, 25 bp, Probe Sequence
ttctctaaatcaatgttcctgttcc

SEQ ID NO: 315374 - DNA, 25 bp, Probe Sequence
ttctcagatcaatcgtgcatcctta

SEQ ID NO: 315375 - DNA, 25 bp, Probe Sequence
ttcatacctctacatgtctgcttga

SEQ ID NO: 315376 - DNA, 25 bp, Probe Sequence
ttctcacccatacagacatcaagcc

SEQ ID NO: 315377 - DNA, 25 bp, Probe Sequence
ttctgagcccagttgaatatcaaga

SEQ ID NO: 315378 - DNA, 25 bp, Probe Sequence
ttcttgccaatcctgaatctgcaac

SEQ ID NO: 315379 - DNA, 25 bp, Probe Sequence
ttctctacactcagatgactctacc

SEQ ID NO: 315380 - DNA, 25 bp, Probe Sequence
ttctcggctcttgacacttagccgc

SEQ ID NO: 315381 - DNA, 25 bp, Probe Sequence
ttctcaggacaatgaatcttcccgt

SEQ ID NO: 315382 - DNA, 25 bp, Probe Sequence
ttctgggagcattaggtcttcctac

SEQ ID NO: 315383 - DNA, 25 bp, Probe Sequence
ttcatgaggactttgcctcttctcc

SEQ ID NO: 315384 - DNA, 25 bp, Probe Sequence
ttcatgggcctgctggccatgtaca

SEQ ID NO: 315385 - DNA, 25 bp, Probe Sequence
ttcatgtgtttgctggaggtcacac

SEQ ID NO: 315386 - DNA, 25 bp, Probe Sequence
ttctgtttctgatgggagtatactt

SEQ ID NO: 315387 - DNA, 25 bp, Probe Sequence
ttgaacacttgacggttgtcccttt

SEQ ID NO: 315388 - DNA, 25 bp, Probe Sequence
ttgaacacttgacggttgtcccttt

SEQ ID NO: 315389 - DNA, 25 bp, Probe Sequence
ttgaccctggagggtatccgccagt

SEQ ID NO: 315390 - DNA, 25 bp, Probe Sequence
ttcgctcctgagcggaatcctgcaa

SEQ ID NO: 315391 - DNA, 25 bp, Probe Sequence
ttcggccatgagccgctacatactc

SEQ ID NO: 315392 - DNA, 25 bp, Probe Sequence
ttcccaaatgtcgtagcaactcccg

SEQ ID NO: 315393 - DNA, 25 bp, Probe Sequence
ttcccaaatgtcgtataccactccg

SEQ ID NO: 315394 - DNA, 25 bp, Probe Sequence
ttcccaatcactggtcatctgaccc

SEQ ID NO: 315395 - DNA, 25 bp, Probe Sequence
ttctatttagctgtcactagcactc

SEQ ID NO: 315396 - DNA, 25 bp, Probe Sequence
ttcatatttcagaaccctctattta

SEQ ID NO: 315397 - DNA, 25 bp, Probe Sequence
ttcatcttttgaacaacttggtttc

SEQ ID NO: 315398 - DNA, 25 bp, Probe Sequence
ttcttgttgtgcaaaaatggtttct

SEQ ID NO: 315399 - DNA, 25 bp, Probe Sequence
ttcttgtcagacataaagccatgtt

SEQ ID NO: 315400 - DNA, 25 bp, Probe Sequence
ttcatttcataaacaaactctgcat

SEQ ID NO: 315401 - DNA, 25 bp, Probe Sequence
ttcatttataactcacatcttgttg

SEQ ID NO: 315402 - DNA, 25 bp, Probe Sequence
ttcattgtctaacacacttcttttt

SEQ ID NO: 315403 - DNA, 25 bp, Probe Sequence
ttgcattgttaaggaggttttttgt

SEQ ID NO: 315404 - DNA, 25 bp, Probe Sequence
ttcatcgtgccatcgggattttttg

SEQ ID NO: 315405 - DNA, 25 bp, Probe Sequence
ttcctgggacctttgattttctatg

SEQ ID NO: 315406 - DNA, 25 bp, Probe Sequence
ttcggtggccactatttctagtcaa

SEQ ID NO: 315407 - DNA, 25 bp, Probe Sequence
ttctggaggacacacagtctcagtc

SEQ ID NO: 315408 - DNA, 25 bp, Probe Sequence
ttcttcatgtgatctcaagtccctt

SEQ ID NO: 315409 - DNA, 25 bp, Probe Sequence
ttcatatcctgatcttagagccccc

SEQ ID NO: 315410 - DNA, 25 bp, Probe Sequence
ttcttctctgaagctaggtacacct

SEQ ID NO: 315411 - DNA, 25 bp, Probe Sequence
ttctttctcaactcagagtccaacc

SEQ ID NO: 315412 - DNA, 25 bp, Probe Sequence
ttctttctatatttctgaggctaag

SEQ ID NO: 315413 - DNA, 25 bp, Probe Sequence
ttcatttttctatataggctgcaca

SEQ ID NO: 315414 - DNA, 25 bp, Probe Sequence
ttcttgtttctgaacttcgtgccat

SEQ ID NO: 315415 - DNA, 25 bp, Probe Sequence
ttcttaactctgacacaattggatg

SEQ ID NO: 315416 - DNA, 25 bp, Probe Sequence
ttcatgtcaggcgttaaactgtcag

SEQ ID NO: 315417 - DNA, 25 bp, Probe Sequence
ttcatgctgaaccattcaagccctc

SEQ ID NO: 315418 - DNA, 25 bp, Probe Sequence
ttccaatactgcatccatggcctgg

SEQ ID NO: 315419 - DNA, 25 bp, Probe Sequence
ttcagaacattgatccttgccgcag

SEQ ID NO: 315420 - DNA, 25 bp, Probe Sequence
ttcttacaactatctggctcacatg

SEQ ID NO: 315421 - DNA, 25 bp, Probe Sequence
ttcatttacacagatatccatgcct

SEQ ID NO: 315422 - DNA, 25 bp, Probe Sequence
ttcatctatgaccaggagtcctccc

SEQ ID NO: 315423 - DNA, 25 bp, Probe Sequence
ttcatcaagcagcagcgcgaggcca

SEQ ID NO: 315424 - DNA, 25 bp, Probe Sequence
ttctcagagcatcggctcgcaggca

SEQ ID NO: 315425 - DNA, 25 bp, Probe Sequence
ttctcagatggcaactcgcagggcg

SEQ ID NO: 315426 - DNA, 25 bp, Probe Sequence
ttctctctgcagacctaggggaaaa

SEQ ID NO: 315427 - DNA, 25 bp, Probe Sequence
ttctttcacaccctgtcgggagaat

SEQ ID NO: 315428 - DNA, 25 bp, Probe Sequence
ttctttccatccctgtgaggcaatg

SEQ ID NO: 315429 - DNA, 25 bp, Probe Sequence
ttctcagacaatgcctgtggaagac

SEQ ID NO: 315430 - DNA, 25 bp, Probe Sequence
ttctcaagaatgcccatctgtgaac

SEQ ID NO: 315431 - DNA, 25 bp, Probe Sequence
ttctaggaatctaccctgcagatat

SEQ ID NO: 315432 - DNA, 25 bp, Probe Sequence
ttctaggaatctgtcatcagaaaat

SEQ ID NO: 315433 - DNA, 25 bp, Probe Sequence
ttcttgtggatctatctcatcaaac

SEQ ID NO: 315434 - DNA, 25 bp, Probe Sequence
ttcatgttgatgatatacacaatgg

SEQ ID NO: 315435 - DNA, 25 bp, Probe Sequence
ttcatgattagaaattacctgtgga

SEQ ID NO: 315436 - DNA, 25 bp, Probe Sequence
ttcatgattagaaattacctgtgga

SEQ ID NO: 315437 - DNA, 25 bp, Probe Sequence
ttctaataattttgcctctgggaat

SEQ ID NO: 315438 - DNA, 25 bp, Probe Sequence
ttccaacatttttgttattggcaag

SEQ ID NO: 315439 - DNA, 25 bp, Probe Sequence
ttctcaccatatgcttttgttggca

SEQ ID NO: 315440 - DNA, 25 bp, Probe Sequence
ttctccctctctgtcaagtttggaa

SEQ ID NO: 315441 - DNA, 25 bp, Probe Sequence
ttcccacttattgccactttgtaat

SEQ ID NO: 315442 - DNA, 25 bp, Probe Sequence
ttcccccatattgttcttgtggtag

SEQ ID NO: 315443 - DNA, 25 bp, Probe Sequence
ttccccaaccttattctgtgtgtag

SEQ ID NO: 315444 - DNA, 25 bp, Probe Sequence
ttctcccaaaaagatgtcttttcga

SEQ ID NO: 315445 - DNA, 25 bp, Probe Sequence
ttctcctaagacttttggtttctcg

SEQ ID NO: 315446 - DNA, 25 bp, Probe Sequence
ttctctaaggagcaatgggtgtacc

SEQ ID NO: 315447 - DNA, 25 bp, Probe Sequence
ttccttctaacgtgtgagatgtccc

SEQ ID NO: 315448 - DNA, 25 bp, Probe Sequence
ttctctgtctaaagtccataagtca

SEQ ID NO: 315449 - DNA, 25 bp, Probe Sequence
ttctctttaatactattagcatcta

SEQ ID NO: 315450 - DNA, 25 bp, Probe Sequence
ttcatcttctgactcattgtgcggc

SEQ ID NO: 315451 - DNA, 25 bp, Probe Sequence
ttcatcatagctctctgctttgggc

SEQ ID NO: 315452 - DNA, 25 bp, Probe Sequence
ttctcataatgaatcctctcaggac

SEQ ID NO: 315453 - DNA, 25 bp, Probe Sequence
ttcataaggcaagtcctgagcgacc

SEQ ID NO: 315454 - DNA, 25 bp, Probe Sequence
ttcatacatggcactttggcatacc

SEQ ID NO: 315455 - DNA, 25 bp, Probe Sequence
ttcatgatgcatgggtcatttgtct

SEQ ID NO: 315456 - DNA, 25 bp, Probe Sequence
ttcatatgctgttgttcacgccttc

SEQ ID NO: 315457 - DNA, 25 bp, Probe Sequence
ttcatgagtccgtatcaacgctatg

SEQ ID NO: 315458 - DNA, 25 bp, Probe Sequence
ttcatgaacacccagcaacctgagc

SEQ ID NO: 315459 - DNA, 25 bp, Probe Sequence
ttcaggagctcctgaactctgcgtg

SEQ ID NO: 315460 - DNA, 25 bp, Probe Sequence
ttcggcgctccagaagcatgtggtt

SEQ ID NO: 315461 - DNA, 25 bp, Probe Sequence
ttctgtagcccagcgatgcatctga

SEQ ID NO: 315462 - DNA, 25 bp, Probe Sequence
ttcttccacacagcgcctgtagaag

SEQ ID NO: 315463 - DNA, 25 bp, Probe Sequence
ttcttcacaaacggcccatgtcaga

SEQ ID NO: 315464 - DNA, 25 bp, Probe Sequence
ttcttgcacaaatccactctgctgc

SEQ ID NO: 315465 - DNA, 25 bp, Probe Sequence
ttcgtaccaagagcaccggtggggc

SEQ ID NO: 315466 - DNA, 25 bp, Probe Sequence
ttcagtgagtgaaaccatcccgggg

SEQ ID NO: 315467 - DNA, 25 bp, Probe Sequence
ttcagtagtgttaccatgcccacct

SEQ ID NO: 315468 - DNA, 25 bp, Probe Sequence
ttcatgtcagtgagagcttcccaca

SEQ ID NO: 315469 - DNA, 25 bp, Probe Sequence
ttcatgatcttgtgactgtcccagt

SEQ ID NO: 315470 - DNA, 25 bp, Probe Sequence
ttgcatttctgaaacttactcagtt

SEQ ID NO: 315471 - DNA, 25 bp, Probe Sequence
ttcatttcatgtgccctactatatt

SEQ ID NO: 315472 - DNA, 25 bp, Probe Sequence
ttcattcatatttcctctcacaaag

SEQ ID NO: 315473 - DNA, 25 bp, Probe Sequence
ttctctctttctcttaataagccca

SEQ ID NO: 315474 - DNA, 25 bp, Probe Sequence
ttctctctttctcttaataagccca

SEQ ID NO: 315475 - DNA, 25 bp, Probe Sequence
ttccttgtactgatataaacacttc

SEQ ID NO: 315476 - DNA, 25 bp, Probe Sequence
ttctcattacctataactacagttc

SEQ ID NO: 315477 - DNA, 25 bp, Probe Sequence
ttcccatttcccagtctgaatgttc

SEQ ID NO: 315478 - DNA, 25 bp, Probe Sequence
ttctcagattatgccaacttcaagt

SEQ ID NO: 315479 - DNA, 25 bp, Probe Sequence
ttcatacattctcatacatttaact

SEQ ID NO: 315480 - DNA, 25 bp, Probe Sequence
ttctacatcctccatacaacttgtt

SEQ ID NO: 315481 - DNA, 25 bp, Probe Sequence
ttctcacatcctgtgggactctgtt

SEQ ID NO: 315482 - DNA, 25 bp, Probe Sequence
ttcatactggctgttggcatttctg

SEQ ID NO: 315483 - DNA, 25 bp, Probe Sequence
ttgcttttgtcgaggttttgggaat

SEQ ID NO: 315484 - DNA, 25 bp, Probe Sequence
ttctttcatgttgtgggttctggga

SEQ ID NO: 315485 - DNA, 25 bp, Probe Sequence
ttcatgttagttttgctccttctgt

SEQ ID NO: 315486 - DNA, 25 bp, Probe Sequence
ttcatgttagttttgctccttctgt

SEQ ID NO: 315487 - DNA, 25 bp, Probe Sequence
ttcatttgacggtctctttttgatc

SEQ ID NO: 315488 - DNA, 25 bp, Probe Sequence
ttcatcttacaggcctttgttgtcc

SEQ ID NO: 315489 - DNA, 25 bp, Probe Sequence
ttcagttgacagtcctttgtactct

SEQ ID NO: 315490 - DNA, 25 bp, Probe Sequence
ttctgcatggaacacgctttcctct

SEQ ID NO: 315491 - DNA, 25 bp, Probe Sequence
ttctgttaaacaggctgcttccttg

SEQ ID NO: 315492 - DNA, 25 bp, Probe Sequence
ttctgttttgaagtgctttcccttt

SEQ ID NO: 315493 - DNA, 25 bp, Probe Sequence
ttctgaggggaagtgccctcgccag

SEQ ID NO: 315494 - DNA, 25 bp, Probe Sequence
ttcaggaggtggagctcgtcgtcag

SEQ ID NO: 315495 - DNA, 25 bp, Probe Sequence
ttcaggcattagcaattcgtcgact

SEQ ID NO: 315496 - DNA, 25 bp, Probe Sequence
ttcaggcaccagcatattcctatgc

SEQ ID NO: 315497 - DNA, 25 bp, Probe Sequence
ttctggactgcactgttgtccttgc

SEQ ID NO: 315498 - DNA, 25 bp, Probe Sequence
ttcatcagactcctgtgcaactttc

SEQ ID NO: 315499 - DNA, 25 bp, Probe Sequence
ttctcaacatgcctggagatgcccc

SEQ ID NO: 315500 - DNA, 25 bp, Probe Sequence
ttctcagacattcagtgtgacccct

SEQ ID NO: 315501 - DNA, 25 bp, Probe Sequence
ttctcagaagtgacaccaaccccgt

SEQ ID NO: 315502 - DNA, 25 bp, Probe Sequence
ttcatgagcaaagtcaccaatccca

SEQ ID NO: 315503 - DNA, 25 bp, Probe Sequence
ttcatgaggcagatcacaacagtaa

SEQ ID NO: 315504 - DNA, 25 bp, Probe Sequence
ttcattgggttgtcagatagtctat

SEQ ID NO: 315505 - DNA, 25 bp, Probe Sequence
ttcatgttgcttagggaacctgata

SEQ ID NO: 315506 - DNA, 25 bp, Probe Sequence
ttctgggctgccaggaaacgatttg

SEQ ID NO: 315507 - DNA, 25 bp, Probe Sequence
ttcaggggcccaggaagagcaaaat

SEQ ID NO: 315508 - DNA, 25 bp, Probe Sequence
ttctggcctggggcacaagagcaaa

SEQ ID NO: 315509 - DNA, 25 bp, Probe Sequence
ttctgagtctcttggactaagaaga

SEQ ID NO: 315510 - DNA, 25 bp, Probe Sequence
ttgtatggcactggaactttggcaa

SEQ ID NO: 315511 - DNA, 25 bp, Probe Sequence
ttgttggaccaaccatcatctcgaa

SEQ ID NO: 315512 - DNA, 25 bp, Probe Sequence
ttctctgagatcgaacggactgtga

SEQ ID NO: 315513 - DNA, 25 bp, Probe Sequence
ttctgtgacattggaagtcatcttg

SEQ ID NO: 315514 - DNA, 25 bp, Probe Sequence
ttcataactgtcaaatgttctttta

SEQ ID NO: 315515 - DNA, 25 bp, Probe Sequence
ttcatcagccggattttgttattga

SEQ ID NO: 315516 - DNA, 25 bp, Probe Sequence
ttcatcagccggattttgttattga

SEQ ID NO: 315517 - DNA, 25 bp, Probe Sequence
ttctaggaggtttgttgttttgcct

SEQ ID NO: 315518 - DNA, 25 bp, Probe Sequence
ttctagggaagtcatctcacttggc

SEQ ID NO: 315519 - DNA, 25 bp, Probe Sequence
ttctcaaggaagcccagctccttgt

SEQ ID NO: 315520 - DNA, 25 bp, Probe Sequence
ttcatcacagcgaagaccagcataa

SEQ ID NO: 315521 - DNA, 25 bp, Probe Sequence
ttctgctcaggaatggcccacaaat

SEQ ID NO: 315522 - DNA, 25 bp, Probe Sequence
ttgtctcgttttcctgccaaataaa

SEQ ID NO: 315523 - DNA, 25 bp, Probe Sequence
ttctacctctttcctggcaattgaa

SEQ ID NO: 315524 - DNA, 25 bp, Probe Sequence
ttctacctcttcccaggacattaaa

SEQ ID NO: 315525 - DNA, 25 bp, Probe Sequence
ttcccactgttcacactgagcaaga

SEQ ID NO: 315526 - DNA, 25 bp, Probe Sequence
ttccccacttctaagccaaagaaag

SEQ ID NO: 315527 - DNA, 25 bp, Probe Sequence
ttccccacagacatccctaaaagtg

SEQ ID NO: 315528 - DNA, 25 bp, Probe Sequence
ttcccaaagtttgccggctgcaagt

SEQ ID NO: 315529 - DNA, 25 bp, Probe Sequence
ttctaaaactttggccgggcgtgat

SEQ ID NO: 315530 - DNA, 25 bp, Probe Sequence
ttctaactacgtacctgggtgccta

SEQ ID NO: 315531 - DNA, 25 bp, Probe Sequence
ttctggccacgggacctggtggcct

SEQ ID NO: 315532 - DNA, 25 bp, Probe Sequence
ttggttcaccaggacgtgatggctc

SEQ ID NO: 315533 - DNA, 25 bp, Probe Sequence
ttcagggccaagaacgtgcggaatg

SEQ ID NO: 315534 - DNA, 25 bp, Probe Sequence
ttcaggaacatagagcagtggacaa

SEQ ID NO: 315535 - DNA, 25 bp, Probe Sequence
ttgacaagaatacacgttactgatc

SEQ ID NO: 315536 - DNA, 25 bp, Probe Sequence
ttgagaaaaaaatgatacagccttc

SEQ ID NO: 315537 - DNA, 25 bp, Probe Sequence
ttggctgccaaagaaggccacctcc

SEQ ID NO: 315538 - DNA, 25 bp, Probe Sequence
ttcctccaaaccagagaaacttgcc

SEQ ID NO: 315539 - DNA, 25 bp, Probe Sequence
ttccacttaaccaggaaatatttct

SEQ ID NO: 315540 - DNA, 25 bp, Probe Sequence
ttctgtttacccatggaaatgtttg

SEQ ID NO: 315541 - DNA, 25 bp, Probe Sequence
ttcttttacactgtgaaacatacac

SEQ ID NO: 315542 - DNA, 25 bp, Probe Sequence
ttcctttattctggtaagataaaag

SEQ ID NO: 315543 - DNA, 25 bp, Probe Sequence
ttccttggtcctggtacgggaggat

SEQ ID NO: 315544 - DNA, 25 bp, Probe Sequence
ttggatttccctgcccaggggaaag

SEQ ID NO: 315545 - DNA, 25 bp, Probe Sequence
ttcgaaactcctgaccagggtaaag

SEQ ID NO: 315546 - DNA, 25 bp, Probe Sequence
ttcctaactcagggaccagggacca

SEQ ID NO: 315547 - DNA, 25 bp, Probe Sequence
ttcttaactgacgtaccatggtagc

SEQ ID NO: 315548 - DNA, 25 bp, Probe Sequence
ttcattttctgcattgactgcattt

SEQ ID NO: 315549 - DNA, 25 bp, Probe Sequence
ttcattttcctgtatattctctgta

SEQ ID NO: 315550 - DNA, 25 bp, Probe Sequence
ttcatttctcctggtacctgtattt

SEQ ID NO: 315551 - DNA, 25 bp, Probe Sequence
ttcatcatgtctatagttcctgaga

SEQ ID NO: 315552 - DNA, 25 bp, Probe Sequence
ttctatgtctaacgtcaacatggaa

SEQ ID NO: 315553 - DNA, 25 bp, Probe Sequence
ttctaattaccagtatatcagagga

SEQ ID NO: 315554 - DNA, 25 bp, Probe Sequence
ttctaacccatcgcaaagaggctaa

SEQ ID NO: 315555 - DNA, 25 bp, Probe Sequence
ttctatacccacccagaatgagaca

SEQ ID NO: 315556 - DNA, 25 bp, Probe Sequence
ttcattcctccattgctaaacagat

SEQ ID NO: 315557 - DNA, 25 bp, Probe Sequence
ttcataacaccattcatcacaaaga

SEQ ID NO: 315558 - DNA, 25 bp, Probe Sequence
ttcagggcctgctatatcaaggtga

SEQ ID NO: 315559 - DNA, 25 bp, Probe Sequence
ttgcaggagcccgagagctgggcgc

SEQ ID NO: 315560 - DNA, 25 bp, Probe Sequence
ttcatcatgaccagaagcttgacgc

SEQ ID NO: 315561 - DNA, 25 bp, Probe Sequence
ttcattgatcgtaagagctctctcc

SEQ ID NO: 315562 - DNA, 25 bp, Probe Sequence
ttcatcatgttgcccaggctcatct

SEQ ID NO: 315563 - DNA, 25 bp, Probe Sequence
ttctcatcttcctggatgcatcgtc

SEQ ID NO: 315564 - DNA, 25 bp, Probe Sequence
ttctcatttgcctagtatctctgcc

SEQ ID NO: 315565 - DNA, 25 bp, Probe Sequence
ttctcatttcaaagttgctaccagt

SEQ ID NO: 315566 - DNA, 25 bp, Probe Sequence
ttctttctctacattgcctacagtg

SEQ ID NO: 315567 - DNA, 25 bp, Probe Sequence
ttcattgtgcgctctttgcggacag

SEQ ID NO: 315568 - DNA, 25 bp, Probe Sequence
ttcagtggcagcttcttgttccata

SEQ ID NO: 315569 - DNA, 25 bp, Probe Sequence
ttcttggacttcctgtggcacaaca

SEQ ID NO: 315570 - DNA, 25 bp, Probe Sequence
ttcttcaggttgatgggcaagccat

SEQ ID NO: 315571 - DNA, 25 bp, Probe Sequence
ttcatccgttgtatcagaaagcgat

SEQ ID NO: 315572 - DNA, 25 bp, Probe Sequence
ttcttcctgtgactgtagaaacagt

SEQ ID NO: 315573 - DNA, 25 bp, Probe Sequence
ttcttccctaggtcaaagccactat

SEQ ID NO: 315574 - DNA, 25 bp, Probe Sequence
ttcttactcatcacaaagaccactt

SEQ ID NO: 315575 - DNA, 25 bp, Probe Sequence
ttcattcacattcacaaagcaaaca

SEQ ID NO: 315576 - DNA, 25 bp, Probe Sequence
ttctgaccagttaccaatcaaagaa

SEQ ID NO: 315577 - DNA, 25 bp, Probe Sequence
ttctgagatcagcgtcctaccaaga

SEQ ID NO: 315578 - DNA, 25 bp, Probe Sequence
ttctcagtcttgtctattcaccaaa

SEQ ID NO: 315579 - DNA, 25 bp, Probe Sequence
ttctcagcatgcattcatcaaagaa

SEQ ID NO: 315580 - DNA, 25 bp, Probe Sequence
ttctctcagcagttgatcaaataca

SEQ ID NO: 315581 - DNA, 25 bp, Probe Sequence
ttcttacctatgtcaatgaaatgct

SEQ ID NO: 315582 - DNA, 25 bp, Probe Sequence
ttcttcactcctgcactgtgattgc

SEQ ID NO: 315583 - DNA, 25 bp, Probe Sequence
ttcttcagccctagatggtgctcgc

SEQ ID NO: 315584 - DNA, 25 bp, Probe Sequence
ttcttgcgccctagacaagctaacc

SEQ ID NO: 315585 - DNA, 25 bp, Probe Sequence
ttcattgccttcaagaaagctggtg

SEQ ID NO: 315586 - DNA, 25 bp, Probe Sequence
ttcatccctctccagaaaaggagaa

SEQ ID NO: 315587 - DNA, 25 bp, Probe Sequence
ttcatccctctccagaagaggagaa

SEQ ID NO: 315588 - DNA, 25 bp, Probe Sequence
ttcatccctctccagaagaggagaa

SEQ ID NO: 315589 - DNA, 25 bp, Probe Sequence
ttcatccctcatccacagtaggaca

SEQ ID NO: 315590 - DNA, 25 bp, Probe Sequence
ttcatccgctggctcaggcaagaga

SEQ ID NO: 315591 - DNA, 25 bp, Probe Sequence
ttcatccgctggctcaggcaagaga

SEQ ID NO: 315592 - DNA, 25 bp, Probe Sequence
ttcatcctctggcatcggaaactcc

SEQ ID NO: 315593 - DNA, 25 bp, Probe Sequence
ttctcctcggacctggagaacgtgc

SEQ ID NO: 315594 - DNA, 25 bp, Probe Sequence
ttctcccaggacaattgaaatttgc

SEQ ID NO: 315595 - DNA, 25 bp, Probe Sequence
ttctgctgccagtcacaatctaaat

SEQ ID NO: 315596 - DNA, 25 bp, Probe Sequence
ttctgtgctggatgctcttcaagta

SEQ ID NO: 315597 - DNA, 25 bp, Probe Sequence
ttctgtgctggatgctcttcaagga

SEQ ID NO: 315598 - DNA, 25 bp, Probe Sequence
ttctgctcagcctcatgttaatgga

SEQ ID NO: 315599 - DNA, 25 bp, Probe Sequence
ttcccagcctgatttctgaaagaaa

SEQ ID NO: 315600 - DNA, 25 bp, Probe Sequence
ttctctctcctttacgagacgaaaa

SEQ ID NO: 315601 - DNA, 25 bp, Probe Sequence
ttctctatcctttctaagttaaaag

SEQ ID NO: 315602 - DNA, 25 bp, Probe Sequence
ttcttacctcgctagatggttaaaa

SEQ ID NO: 315603 - DNA, 25 bp, Probe Sequence
ttcttacctctcagttgttgaaaca

SEQ ID NO: 315604 - DNA, 25 bp, Probe Sequence
ttctgaacccagagttattagagac

SEQ ID NO: 315605 - DNA, 25 bp, Probe Sequence
ttctgagtcaccttgagttatttga

SEQ ID NO: 315606 - DNA, 25 bp, Probe Sequence
ttcatagtaacattattcataattg

SEQ ID NO: 315607 - DNA, 25 bp, Probe Sequence
ttctgaaaacataaccagccattgg

SEQ ID NO: 315608 - DNA, 25 bp, Probe Sequence
ttgccaaagccacaacagtagtgga

SEQ ID NO: 315609 - DNA, 25 bp, Probe Sequence
ttctcaccaggggccagagtcaggg

SEQ ID NO: 315610 - DNA, 25 bp, Probe Sequence
ttctgattaagagccagggccagag

SEQ ID NO: 315611 - DNA, 25 bp, Probe Sequence
ttctgcaccaatgaacagtggccag

SEQ ID NO: 315612 - DNA, 25 bp, Probe Sequence
ttctcagccaagcgaggtggctcac

SEQ ID NO: 315613 - DNA, 25 bp, Probe Sequence
ttctcaaccagaggtgggagctgcc

SEQ ID NO: 315614 - DNA, 25 bp, Probe Sequence
ttcataacccagctgtggaccactg

SEQ ID NO: 315615 - DNA, 25 bp, Probe Sequence
ttcatacaacgcctcagtggatcca

SEQ ID NO: 315616 - DNA, 25 bp, Probe Sequence
ttctaccacgtttctggatacagtg

SEQ ID NO: 315617 - DNA, 25 bp, Probe Sequence
ttctacagcagcataccatgttaca

SEQ ID NO: 315618 - DNA, 25 bp, Probe Sequence
ttctacagacagaccagattctcac

SEQ ID NO: 315619 - DNA, 25 bp, Probe Sequence
ttctcaaggcgattcagactctgac

SEQ ID NO: 315620 - DNA, 25 bp, Probe Sequence
ttctgaggagctgtcaggccatgtc

SEQ ID NO: 315621 - DNA, 25 bp, Probe Sequence
ttcatactgatgccctgaggcactg

SEQ ID NO: 315622 - DNA, 25 bp, Probe Sequence
ttcatgttgtgtgctgggctctgga

SEQ ID NO: 315623 - DNA, 25 bp, Probe Sequence
ttcattggatgattctggagctcta

SEQ ID NO: 315624 - DNA, 25 bp, Probe Sequence
ttcattaatatacaggcttagtcag

SEQ ID NO: 315625 - DNA, 25 bp, Probe Sequence
ttcatttataatcactttagtagtt

SEQ ID NO: 315626 - DNA, 25 bp, Probe Sequence
ttcttgttcattgactttggtacga

SEQ ID NO: 315627 - DNA, 25 bp, Probe Sequence
ttctatttgcctgccttagttggga

SEQ ID NO: 315628 - DNA, 25 bp, Probe Sequence
ttctcatttcctgtttgctgtatgg

SEQ ID NO: 315629 - DNA, 25 bp, Probe Sequence
ttcatgcttgtggctttgttgtgtt

SEQ ID NO: 315630 - DNA, 25 bp, Probe Sequence
ttctgacatgtgcctatgcgtttgt

SEQ ID NO: 315631 - DNA, 25 bp, Probe Sequence
ttcttcatggtgcagcgctttggtc

SEQ ID NO: 315632 - DNA, 25 bp, Probe Sequence
ttgctgttggtaaccttcgagtccc

SEQ ID NO: 315633 - DNA, 25 bp, Probe Sequence
ttctttgcattcgtccttaggtact

SEQ ID NO: 315634 - DNA, 25 bp, Probe Sequence
ttcttctgattgctcctggggaaaa

SEQ ID NO: 315635 - DNA, 25 bp, Probe Sequence
ttctttattctggcctggggcacaa

SEQ ID NO: 315636 - DNA, 25 bp, Probe Sequence
ttcatagtattgtcgcctggtggca

SEQ ID NO: 315637 - DNA, 25 bp, Probe Sequence
ttctatgttatgccggtggttaatg

SEQ ID NO: 315638 - DNA, 25 bp, Probe Sequence
ttctgttctcacttttggctttatg

SEQ ID NO: 315639 - DNA, 25 bp, Probe Sequence
ttctgttctcacttttggctttatg

SEQ ID NO: 315640 - DNA, 25 bp, Probe Sequence
ttctatgtgccgttttgttgttatt

SEQ ID NO: 315641 - DNA, 25 bp, Probe Sequence
ttcattgtcactgttgttgtttttc

SEQ ID NO: 315642 - DNA, 25 bp, Probe Sequence
ttcttgtcacttttttacagctttc

SEQ ID NO: 315643 - DNA, 25 bp, Probe Sequence
ttctattaatcttttgtcaacttcc

SEQ ID NO: 315644 - DNA, 25 bp, Probe Sequence
ttctatataactttatgccaccctt

SEQ ID NO: 315645 - DNA, 25 bp, Probe Sequence
ttctttatatcttttgagctccctc

SEQ ID NO: 315646 - DNA, 25 bp, Probe Sequence
ttctttatatcttttgagctccctc

SEQ ID NO: 315647 - DNA, 25 bp, Probe Sequence
ttctttatatcttttgagctccctc

SEQ ID NO: 315648 - DNA, 25 bp, Probe Sequence
ttctttatatcttttgagctccctc

SEQ ID NO: 315649 - DNA, 25 bp, Probe Sequence
ttctttatatcttttgagctccctc

SEQ ID NO: 315650 - DNA, 25 bp, Probe Sequence
ttcttaatatcactttggtctccat

SEQ ID NO: 315651 - DNA, 25 bp, Probe Sequence
ttcttgagaattctcgtcttccatc

SEQ ID NO: 315652 - DNA, 25 bp, Probe Sequence
ttcttgagtaatcacaccatttcat

SEQ ID NO: 315653 - DNA, 25 bp, Probe Sequence
ttctagcgtcttcacagcgaataca

SEQ ID NO: 315654 - DNA, 25 bp, Probe Sequence
ttctcaggtctacacacggaatgct

SEQ ID NO: 315655 - DNA, 25 bp, Probe Sequence
ttctacttcttgatccggaagcgaa

SEQ ID NO: 315656 - DNA, 25 bp, Probe Sequence
ttctagttctagatctctggaatac

SEQ ID NO: 315657 - DNA, 25 bp, Probe Sequence
ttctctgtttaaacctgtattaata

SEQ ID NO: 315658 - DNA, 25 bp, Probe Sequence
ttctttttctgaagcctctaacaaa

SEQ ID NO: 315659 - DNA, 25 bp, Probe Sequence
ttctattctttgatgtgtataaaaa

SEQ ID NO: 315660 - DNA, 25 bp, Probe Sequence
ttcatcattcctaatgttgtaaaat

SEQ ID NO: 315661 - DNA, 25 bp, Probe Sequence
ttctcacttgccaatatagtaaagc

SEQ ID NO: 315662 - DNA, 25 bp, Probe Sequence
ttcttctgtgcctactcagtaaaat

SEQ ID NO: 315663 - DNA, 25 bp, Probe Sequence
ttctttgtggcttacactggaaatt

SEQ ID NO: 315664 - DNA, 25 bp, Probe Sequence
ttctgttaggcctacatcgtggaat

SEQ ID NO: 315665 - DNA, 25 bp, Probe Sequence
ttcgtggaacactaccgggagatct

SEQ ID NO: 315666 - DNA, 25 bp, Probe Sequence
ttctctaaaacttccacaaagatca

SEQ ID NO: 315667 - DNA, 25 bp, Probe Sequence
ttcttcagaaaacctccaaagtaga

SEQ ID NO: 315668 - DNA, 25 bp, Probe Sequence
ttctgtaataagcttccttttataa

SEQ ID NO: 315669 - DNA, 25 bp, Probe Sequence
ttctgtaattggcttttgaatcaaa

SEQ ID NO: 315670 - DNA, 25 bp, Probe Sequence
ttctataattagcgttcttcacccc

SEQ ID NO: 315671 - DNA, 25 bp, Probe Sequence
ttctagatactacagttcttactcc

SEQ ID NO: 315672 - DNA, 25 bp, Probe Sequence
ttctattactattatttgcctacat

SEQ ID NO: 315673 - DNA, 25 bp, Probe Sequence
ttctagtcctattctattgcagtta

SEQ ID NO: 315674 - DNA, 25 bp, Probe Sequence
ttctcattgccattagtaatgactg

SEQ ID NO: 315675 - DNA, 25 bp, Probe Sequence
ttctattgacattcctcaagatatt

SEQ ID NO: 315676 - DNA, 25 bp, Probe Sequence
ttctgcttactagctcagtgatctt

SEQ ID NO: 315677 - DNA, 25 bp, Probe Sequence
ttcatttactgagagcctattctgg

SEQ ID NO: 315678 - DNA, 25 bp, Probe Sequence
ttcttgtactatatcctttgcctgt

SEQ ID NO: 315679 - DNA, 25 bp, Probe Sequence
ttcttattttttctgggccattaga

SEQ ID NO: 315680 - DNA, 25 bp, Probe Sequence
ttctttttttcagtcagaggcctta

SEQ ID NO: 315681 - DNA, 25 bp, Probe Sequence
ttcttttctttgatctgtgtgcctg

SEQ ID NO: 315682 - DNA, 25 bp, Probe Sequence
ttctatctttttatcttggcgcatt

SEQ ID NO: 315683 - DNA, 25 bp, Probe Sequence
ttctatttttggtctcatctggagt

SEQ ID NO: 315684 - DNA, 25 bp, Probe Sequence
ttcattgtcttaggccttcatggag

SEQ ID NO: 315685 - DNA, 25 bp, Probe Sequence
ttctgtgttgaagcactgttggttg

SEQ ID NO: 315686 - DNA, 25 bp, Probe Sequence
ttctctgtgtaacctcatttggggg

SEQ ID NO: 315687 - DNA, 25 bp, Probe Sequence
ttctcattacaacccttctggttat

SEQ ID NO: 315688 - DNA, 25 bp, Probe Sequence
ttctcacatccatctacttttttat

SEQ ID NO: 315689 - DNA, 25 bp, Probe Sequence
ttctactccttacttgctattttat

SEQ ID NO: 315690 - DNA, 25 bp, Probe Sequence
ttctacttataacctgttgctatta

SEQ ID NO: 315691 - DNA, 25 bp, Probe Sequence
ttctaccttggaactgtattagata

SEQ ID NO: 315692 - DNA, 25 bp, Probe Sequence
ttctaccttggaactgtattagata

SEQ ID NO: 315693 - DNA, 25 bp, Probe Sequence
ttctcagcactttcccatgtattga

SEQ ID NO: 315694 - DNA, 25 bp, Probe Sequence
ttctcagcactttcccatgtattga

SEQ ID NO: 315695 - DNA, 25 bp, Probe Sequence
ttctagcatcctgacatcactgtta

SEQ ID NO: 315696 - DNA, 25 bp, Probe Sequence
ttgaaggcctactcacttctagacc

SEQ ID NO: 315697 - DNA, 25 bp, Probe Sequence
ttgacagagcctacccaaataagaa

SEQ ID NO: 315698 - DNA, 25 bp, Probe Sequence
ttgcataagctgaactaaaataaaa

SEQ ID NO: 315699 - DNA, 25 bp, Probe Sequence
ttcatagcagtagcattcataatta

SEQ ID NO: 315700 - DNA, 25 bp, Probe Sequence
ttcatacagctttgtctgatattta

SEQ ID NO: 315701 - DNA, 25 bp, Probe Sequence
ttcatacgcctctactgatacatgt

SEQ ID NO: 315702 - DNA, 25 bp, Probe Sequence
ttcataggcctctttgcatcagatt

SEQ ID NO: 315703 - DNA, 25 bp, Probe Sequence
ttcatttgctcctttgtcatattgt

SEQ ID NO: 315704 - DNA, 25 bp, Probe Sequence
ttcttctgccaatttactatgattg

SEQ ID NO: 315705 - DNA, 25 bp, Probe Sequence
ttcattgatgactacctactgagca

SEQ ID NO: 315706 - DNA, 25 bp, Probe Sequence
ttcctgtgaatgtcactgacgtgaa

SEQ ID NO: 315707 - DNA, 25 bp, Probe Sequence
ttcccatggtgttctgacttcaagg

SEQ ID NO: 315708 - DNA, 25 bp, Probe Sequence
ttcggcattcgttatacggaagatg

SEQ ID NO: 315709 - DNA, 25 bp, Probe Sequence
ttctgttgtcttttactaggactgt

SEQ ID NO: 315710 - DNA, 25 bp, Probe Sequence
ttcgtttgaaagtcagctgggcacg

SEQ ID NO: 315711 - DNA, 25 bp, Probe Sequence
ttgtgtatgtggaaatgtgctgggc

SEQ ID NO: 315712 - DNA, 25 bp, Probe Sequence
ttcgtgatctggggatgtgccaccc

SEQ ID NO: 315713 - DNA, 25 bp, Probe Sequence
ttcggctgtggggattgccgcttgg

SEQ ID NO: 315714 - DNA, 25 bp, Probe Sequence
ttcgcctgtgatggacttccagtgt

SEQ ID NO: 315715 - DNA, 25 bp, Probe Sequence
ttgcccaggagggtctcgaactcct

SEQ ID NO: 315716 - DNA, 25 bp, Probe Sequence
ttctgccaggaggtcgtcgacctcg

SEQ ID NO: 315717 - DNA, 25 bp, Probe Sequence
ttcccccgagacggcgactatcggg

SEQ ID NO: 315718 - DNA, 25 bp, Probe Sequence
ttccatcccaggaggccaaacggtg

SEQ ID NO: 315719 - DNA, 25 bp, Probe Sequence
ttcctcccaagtggtgcctaaagtt

SEQ ID NO: 315720 - DNA, 25 bp, Probe Sequence
ttcttcccaggtgtgccaaggaatt

SEQ ID NO: 315721 - DNA, 25 bp, Probe Sequence
ttcttgcttttgcattataaggaat

SEQ ID NO: 315722 - DNA, 25 bp, Probe Sequence
ttcttcctgtctcctttgaagtaga

SEQ ID NO: 315723 - DNA, 25 bp, Probe Sequence
ttctctcccttgctttggagtggac

SEQ ID NO: 315724 - DNA, 25 bp, Probe Sequence
ttcttccagggagattagtggtgat

SEQ ID NO: 315725 - DNA, 25 bp, Probe Sequence
ttgtttctggtgggatcgttggcta

SEQ ID NO: 315726 - DNA, 25 bp, Probe Sequence
ttcattttaatgtgcttgttggtat

SEQ ID NO: 315727 - DNA, 25 bp, Probe Sequence
ttctgttaagttagtctgttgttat

SEQ ID NO: 315728 - DNA, 25 bp, Probe Sequence
ttctttcgaagtgtggtgtctttta

SEQ ID NO: 315729 - DNA, 25 bp, Probe Sequence
ttctttggaactttggctggtctgt

SEQ ID NO: 315730 - DNA, 25 bp, Probe Sequence
ttcttttgagacattagccagtagc

SEQ ID NO: 315731 - DNA, 25 bp, Probe Sequence
ttcttctctgaaattgatagaacta

SEQ ID NO: 315732 - DNA, 25 bp, Probe Sequence
ttctcattcagaaatgtgcacacta

SEQ ID NO: 315733 - DNA, 25 bp, Probe Sequence
ttctcagctggaaatggcaaatgaa

SEQ ID NO: 315734 - DNA, 25 bp, Probe Sequence
ttctcagtggtctagaaaatcagaa

SEQ ID NO: 315735 - DNA, 25 bp, Probe Sequence
ttctcatctggttcagaacttagaa

SEQ ID NO: 315736 - DNA, 25 bp, Probe Sequence
ttctcatatagatcaaacagcccta

SEQ ID NO: 315737 - DNA, 25 bp, Probe Sequence
ttctctacagttgtacccctaggga

SEQ ID NO: 315738 - DNA, 25 bp, Probe Sequence
ttctctgaagctaggtacaccttag

SEQ ID NO: 315739 - DNA, 25 bp, Probe Sequence
ttctcgactctttgcaacagcactt

SEQ ID NO: 315740 - DNA, 25 bp, Probe Sequence
ttctctgtcttttctatcaaaattt

SEQ ID NO: 315741 - DNA, 25 bp, Probe Sequence
ttctcatgaattcttaaaggattat

SEQ ID NO: 315742 - DNA, 25 bp, Probe Sequence
ttctcagaatcccttaacagttgta

SEQ ID NO: 315743 - DNA, 25 bp, Probe Sequence
ttctgcagaacttactgtacagttt

SEQ ID NO: 315744 - DNA, 25 bp, Probe Sequence
ttcgaagattaccagatcatcagtt

SEQ ID NO: 315745 - DNA, 25 bp, Probe Sequence
ttctgtgtggctgacagtctcagtt

SEQ ID NO: 315746 - DNA, 25 bp, Probe Sequence
ttctgcagggctgaaagcacaggtg

SEQ ID NO: 315747 - DNA, 25 bp, Probe Sequence
ttctgccggccacataacatttgca

SEQ ID NO: 315748 - DNA, 25 bp, Probe Sequence
ttctcttcctcacctgaaattatgc

SEQ ID NO: 315749 - DNA, 25 bp, Probe Sequence
ttctcttcctcacctgaaattatgc

SEQ ID NO: 315750 - DNA, 25 bp, Probe Sequence
ttctcttcctcacctgaaattatgc

SEQ ID NO: 315751 - DNA, 25 bp, Probe Sequence
ttctcttcctcacctgaaattatgc

SEQ ID NO: 315752 - DNA, 25 bp, Probe Sequence
ttctttcctcctagaatctgtgatc

SEQ ID NO: 315753 - DNA, 25 bp, Probe Sequence
ttctatccctttacctttgaggtca

SEQ ID NO: 315754 - DNA, 25 bp, Probe Sequence
ttctatcaccttactactaataaac

SEQ ID NO: 315755 - DNA, 25 bp, Probe Sequence
ttcttcacctgctatcatttacata

SEQ ID NO: 315756 - DNA, 25 bp, Probe Sequence
ttcttgcaagtgtccttctacaata

SEQ ID NO: 315757 - DNA, 25 bp, Probe Sequence
ttcttcagagtctaccttaccatat

SEQ ID NO: 315758 - DNA, 25 bp, Probe Sequence
ttcttctggattccttatttgattt

SEQ ID NO: 315759 - DNA, 25 bp, Probe Sequence
ttcttattcattccacttttgtctc

SEQ ID NO: 315760 - DNA, 25 bp, Probe Sequence
ttcttaacatattcctgtgtctttg

SEQ ID NO: 315761 - DNA, 25 bp, Probe Sequence
ttctgttagatgtcatgccttgttt

SEQ ID NO: 315762 - DNA, 25 bp, Probe Sequence
ttctattcagagtactgtttttaga

SEQ ID NO: 315763 - DNA, 25 bp, Probe Sequence
ttctgcataaggtttttttgtagtg

SEQ ID NO: 315764 - DNA, 25 bp, Probe Sequence
ttctcaaagtgatctgatatttgga

SEQ ID NO: 315765 - DNA, 25 bp, Probe Sequence
ttgccacaattatgtgtttcccata

SEQ ID NO: 315766 - DNA, 25 bp, Probe Sequence
ttcccatattagcttttactcagat

SEQ ID NO: 315767 - DNA, 25 bp, Probe Sequence
ttccctattaaaattagaacctgag

SEQ ID NO: 315768 - DNA, 25 bp, Probe Sequence
ttctcctgtttttattaaaccagtg

SEQ ID NO: 315769 - DNA, 25 bp, Probe Sequence
ttctccctgctcaggtctagaatcc

SEQ ID NO: 315770 - DNA, 25 bp, Probe Sequence
ttctagcctgtcggggtgtgcaagg

SEQ ID NO: 315771 - DNA, 25 bp, Probe Sequence
ttcattgccgccgagggcattcaca

SEQ ID NO: 315772 - DNA, 25 bp, Probe Sequence
ttcgtgagcggcgagcggctcatca

SEQ ID NO: 315773 - DNA, 25 bp, Probe Sequence
ttctctgatgcagggcacttgctcc

SEQ ID NO: 315774 - DNA, 25 bp, Probe Sequence
ttcttgtgatcttgctctatctcac

SEQ ID NO: 315775 - DNA, 25 bp, Probe Sequence
ttcattgtttcagttatctatccaa

SEQ ID NO: 315776 - DNA, 25 bp, Probe Sequence
ttcattgttcaaatattcattgcac

SEQ ID NO: 315777 - DNA, 25 bp, Probe Sequence
ttctatttcatacattctcatacat

SEQ ID NO: 315778 - DNA, 25 bp, Probe Sequence
ttcttcctaacattggtcagcagat

SEQ ID NO: 315779 - DNA, 25 bp, Probe Sequence
ttcatttcaaaattgctgccagtgt

SEQ ID NO: 315780 - DNA, 25 bp, Probe Sequence
ttcatattcatttgtatccaaggtg

SEQ ID NO: 315781 - DNA, 25 bp, Probe Sequence
ttctcacacttgttgcaccaaagtg

SEQ ID NO: 315782 - DNA, 25 bp, Probe Sequence
ttccccatagtgacgccaataggac

SEQ ID NO: 315783 - DNA, 25 bp, Probe Sequence
ttccctgctaggagtgcgacaagca

SEQ ID NO: 315784 - DNA, 25 bp, Probe Sequence
ttcccgccggcgcggatcaagaaga

SEQ ID NO: 315785 - DNA, 25 bp, Probe Sequence
ttgcccagcccagggggaaagggag

SEQ ID NO: 315786 - DNA, 25 bp, Probe Sequence
ttccacgcccactcgggcaaagagg

SEQ ID NO: 315787 - DNA, 25 bp, Probe Sequence
ttccctgatacccagcggaaaaggg

SEQ ID NO: 315788 - DNA, 25 bp, Probe Sequence
ttctcctgacaaagccgctgaagaa

SEQ ID NO: 315789 - DNA, 25 bp, Probe Sequence
ttctcctgaatcagcagggatggaa

SEQ ID NO: 315790 - DNA, 25 bp, Probe Sequence
ttctctgagcagtcagggtgggaag

SEQ ID NO: 315791 - DNA, 25 bp, Probe Sequence
ttctgcattctgtcgggcggtgaaa

SEQ ID NO: 315792 - DNA, 25 bp, Probe Sequence
ttctgcctgtgctgtgggggagaga

SEQ ID NO: 315793 - DNA, 25 bp, Probe Sequence
ttctcactctgagggagggaggctg

SEQ ID NO: 315794 - DNA, 25 bp, Probe Sequence
ttcttcatctgtgacgtggagctgg

SEQ ID NO: 315795 - DNA, 25 bp, Probe Sequence
ttcttacttgaattgtgcaatttgt

SEQ ID NO: 315796 - DNA, 25 bp, Probe Sequence
ttcattccttgatttgtgtttgtct

SEQ ID NO: 315797 - DNA, 25 bp, Probe Sequence
ttcttcttgctgatgatttttttcc

SEQ ID NO: 315798 - DNA, 25 bp, Probe Sequence
ttctttctgtattgagtatcctttc

SEQ ID NO: 315799 - DNA, 25 bp, Probe Sequence
ttcatttgttcattcatgcattcac

SEQ ID NO: 315800 - DNA, 25 bp, Probe Sequence
ttcttggtctcagcatgttgactgg

SEQ ID NO: 315801 - DNA, 25 bp, Probe Sequence
ttctaggtcccaattctactgcaaa

SEQ ID NO: 315802 - DNA, 25 bp, Probe Sequence
ttcttgctgtccaatttctattaaa

SEQ ID NO: 315803 - DNA, 25 bp, Probe Sequence
ttcctgcatgaaaagtttaatagat

SEQ ID NO: 315804 - DNA, 25 bp, Probe Sequence
ttcccatagttacgtccaatagtga

SEQ ID NO: 315805 - DNA, 25 bp, Probe Sequence
ttctccaagctgaagggccgtgggc

SEQ ID NO: 315806 - DNA, 25 bp, Probe Sequence
ttctgccaacgcaaggactggaagg

SEQ ID NO: 315807 - DNA, 25 bp, Probe Sequence
ttcttctgcagcctcaggagcgaga

SEQ ID NO: 315808 - DNA, 25 bp, Probe Sequence
ttcttctgcagcctcaggagcgaga

SEQ ID NO: 315809 - DNA, 25 bp, Probe Sequence
ttcttgctgccccatgagtgtggca

SEQ ID NO: 315810 - DNA, 25 bp, Probe Sequence
ttctctgatgatcactggtgttgag

SEQ ID NO: 315811 - DNA, 25 bp, Probe Sequence
ttctctattgcttaggatattaaag

SEQ ID NO: 315812 - DNA, 25 bp, Probe Sequence
ttcttagtgctgtgttataagcttt

SEQ ID NO: 315813 - DNA, 25 bp, Probe Sequence
ttctgtaactttgtctaaggattta

SEQ ID NO: 315814 - DNA, 25 bp, Probe Sequence
ttctgtatttttgctctccgtgaaa

SEQ ID NO: 315815 - DNA, 25 bp, Probe Sequence
ttcttgatttttacgtttgaagaca

SEQ ID NO: 315816 - DNA, 25 bp, Probe Sequence
ttcctagagttccttgttcggaaca

SEQ ID NO: 315817 - DNA, 25 bp, Probe Sequence
ttcttctggttcctcagtgagctgg

SEQ ID NO: 315818 - DNA, 25 bp, Probe Sequence
ttctttggtgctgtcagatcatagt

SEQ ID NO: 315819 - DNA, 25 bp, Probe Sequence
ttctgccttgttttgcgacattgtc

SEQ ID NO: 315820 - DNA, 25 bp, Probe Sequence
ttctgccttgctatgggttgttcaa

SEQ ID NO: 315821 - DNA, 25 bp, Probe Sequence
ttctatatttcaatgcggttgtatt

SEQ ID NO: 315822 - DNA, 25 bp, Probe Sequence
ttctaatatttaaggagtgttttgt

SEQ ID NO: 315823 - DNA, 25 bp, Probe Sequence
ttctttattttgggaccttctgtgt

SEQ ID NO: 315824 - DNA, 25 bp, Probe Sequence
ttcttccatttgaaataccttatta

SEQ ID NO: 315825 - DNA, 25 bp, Probe Sequence
ttctgggttgtaaaatactttgaat

SEQ ID NO: 315826 - DNA, 25 bp, Probe Sequence
ttctgggttgtcacaaagctcagta

SEQ ID NO: 315827 - DNA, 25 bp, Probe Sequence
ttctgaatgttatctccaaccagga

SEQ ID NO: 315828 - DNA, 25 bp, Probe Sequence
ttctggagttgtttgcgcataaagg

SEQ ID NO: 315829 - DNA, 25 bp, Probe Sequence
ttctggtttctctaccataagggcc

SEQ ID NO: 315830 - DNA, 25 bp, Probe Sequence
ttcccactactccactacaagtagc

SEQ ID NO: 315831 - DNA, 25 bp, Probe Sequence
ttctacaatcctgttacatagatat

SEQ ID NO: 315832 - DNA, 25 bp, Probe Sequence
ttctaccacctgttcttaatgtaac

SEQ ID NO: 315833 - DNA, 25 bp, Probe Sequence
ttctcactcaccagtttcctgaaat

SEQ ID NO: 315834 - DNA, 25 bp, Probe Sequence
ttctcactcaccagtttcctgaaat

SEQ ID NO: 315835 - DNA, 25 bp, Probe Sequence
ttctacactttaatttcctgaaata

SEQ ID NO: 315836 - DNA, 25 bp, Probe Sequence
ttcttcctgttcattatgctttaat

SEQ ID NO: 315837 - DNA, 25 bp, Probe Sequence
ttgttcctgaatacccagtttaagt

SEQ ID NO: 315838 - DNA, 25 bp, Probe Sequence
ttcttctctatatccgccattgata

SEQ ID NO: 315839 - DNA, 25 bp, Probe Sequence
ttcttggctaattcgcccagaatat

SEQ ID NO: 315840 - DNA, 25 bp, Probe Sequence
ttgccatggtaatcctgctcagtac

SEQ ID NO: 315841 - DNA, 25 bp, Probe Sequence
ttcccgtatatttgtctcgtaccta

SEQ ID NO: 315842 - DNA, 25 bp, Probe Sequence
ttccacagttatgattgtcctccct

SEQ ID NO: 315843 - DNA, 25 bp, Probe Sequence
ttcgaacttaacagatgcctcctct

SEQ ID NO: 315844 - DNA, 25 bp, Probe Sequence
ttctaactataaacttggatcacct

SEQ ID NO: 315845 - DNA, 25 bp, Probe Sequence
ttctatattctaaaattaacacaca

SEQ ID NO: 315846 - DNA, 25 bp, Probe Sequence
ttcttttccgaaatgtacccatagg

SEQ ID NO: 315847 - DNA, 25 bp, Probe Sequence
ttcttatacggattcttaccctaag

SEQ ID NO: 315848 - DNA, 25 bp, Probe Sequence
ttcttccagggctatctgtacccta

SEQ ID NO: 315849 - DNA, 25 bp, Probe Sequence
ttctttatggcctatagtctcactc

SEQ ID NO: 315850 - DNA, 25 bp, Probe Sequence
ttctggctaggcttatacctcgcat

SEQ ID NO: 315851 - DNA, 25 bp, Probe Sequence
ttctgatcttgtcaaacccagcctg

SEQ ID NO: 315852 - DNA, 25 bp, Probe Sequence
ttcttcctgaagacagacccagcct

SEQ ID NO: 315853 - DNA, 25 bp, Probe Sequence
ttctctcctgtcaacagtggccagc

SEQ ID NO: 315854 - DNA, 25 bp, Probe Sequence
ttcttctgatgtaacatgtgataca

SEQ ID NO: 315855 - DNA, 25 bp, Probe Sequence
ttcttgcatttccatgagctgaaaa

SEQ ID NO: 315856 - DNA, 25 bp, Probe Sequence
ttctgctgcttcgctgcagggataa

SEQ ID NO: 315857 - DNA, 25 bp, Probe Sequence
ttctgctcttcatctaaggtctgag

SEQ ID NO: 315858 - DNA, 25 bp, Probe Sequence
ttctctgcttcactctggaggatct

SEQ ID NO: 315859 - DNA, 25 bp, Probe Sequence
ttctcggtgctgatgcagatgcgtt

SEQ ID NO: 315860 - DNA, 25 bp, Probe Sequence
ttctgggctgcgaagacatggctct

SEQ ID NO: 315861 - DNA, 25 bp, Probe Sequence
ttcttgggtgtattgcatgggctgc

SEQ ID NO: 315862 - DNA, 25 bp, Probe Sequence
ttcttgttttatacatgtgatctta

SEQ ID NO: 315863 - DNA, 25 bp, Probe Sequence
ttcttgtgttttactgtcagattaa

SEQ ID NO: 315864 - DNA, 25 bp, Probe Sequence
ttctcaggctttcagcttgaactaa

SEQ ID NO: 315865 - DNA, 25 bp, Probe Sequence
ttctctttttcttcttgtactatat

SEQ ID NO: 315866 - DNA, 25 bp, Probe Sequence
ttctctttactggatgtttatttat

SEQ ID NO: 315867 - DNA, 25 bp, Probe Sequence
ttcttattactgaattcttatattt

SEQ ID NO: 315868 - DNA, 25 bp, Probe Sequence
ttcttatatatctcacgtgcataat

SEQ ID NO: 315869 - DNA, 25 bp, Probe Sequence
ttcttgccatactgcataggctaga

SEQ ID NO: 315870 - DNA, 25 bp, Probe Sequence
ttcattgtctacctgctaagtcaag

SEQ ID NO: 315871 - DNA, 25 bp, Probe Sequence
ttcattgtctacctgctaagtcaag

SEQ ID NO: 315872 - DNA, 25 bp, Probe Sequence
ttcttctgctacatctgcaaggcca

SEQ ID NO: 315873 - DNA, 25 bp, Probe Sequence
ttctgttgcgccactgagacggcag

SEQ ID NO: 315874 - DNA, 25 bp, Probe Sequence
ttctttgcaggaaaaatgctggcag

SEQ ID NO: 315875 - DNA, 25 bp, Probe Sequence
ttctttcggaagtgtgagtgcatgc

SEQ ID NO: 315876 - DNA, 25 bp, Probe Sequence
ttcttatccgagagagtgagagcgc

SEQ ID NO: 315877 - DNA, 25 bp, Probe Sequence
ttcctatgtgggcgacgaggcccag

SEQ ID NO: 315878 - DNA, 25 bp, Probe Sequence
ttccttaatggtagaagcccagcca

SEQ ID NO: 315879 - DNA, 25 bp, Probe Sequence
ttctctctaaggagaatggcccagt

SEQ ID NO: 315880 - DNA, 25 bp, Probe Sequence
ttctgctctaagtagtggatggcca

SEQ ID NO: 315881 - DNA, 25 bp, Probe Sequence
ttctctgtatagtactggcatggta

SEQ ID NO: 315882 - DNA, 25 bp, Probe Sequence
ttctctcctagtttggctggggaag

SEQ ID NO: 315883 - DNA, 25 bp, Probe Sequence
ttcttgccttgatgtactggagcaa

SEQ ID NO: 315884 - DNA, 25 bp, Probe Sequence
ttccccttggaaactggcacaagac

SEQ ID NO: 315885 - DNA, 25 bp, Probe Sequence
ttcttggcttggaaactgggcggcc

SEQ ID NO: 315886 - DNA, 25 bp, Probe Sequence
ttctatgtcggtataatggcccgcc

SEQ ID NO: 315887 - DNA, 25 bp, Probe Sequence
ttctggtagccatttaattcctccc

SEQ ID NO: 315888 - DNA, 25 bp, Probe Sequence
ttctacatactatggaatttctccc

SEQ ID NO: 315889 - DNA, 25 bp, Probe Sequence
ttctacacctacttggatatacttc

SEQ ID NO: 315890 - DNA, 25 bp, Probe Sequence
ttctcactcctacctggtaatttaa

SEQ ID NO: 315891 - DNA, 25 bp, Probe Sequence
ttctcccaatagatttagattataa

SEQ ID NO: 315892 - DNA, 25 bp, Probe Sequence
ttctgaccagttacccttgtgtatc

SEQ ID NO: 315893 - DNA, 25 bp, Probe Sequence
ttcttccagctgaagccactttttc

SEQ ID NO: 315894 - DNA, 25 bp, Probe Sequence
ttcttcgagggacctgctattcttc

SEQ ID NO: 315895 - DNA, 25 bp, Probe Sequence
ttcctccggtagcttttcagatgct

SEQ ID NO: 315896 - DNA, 25 bp, Probe Sequence
ttctcccggttcattttatgcgtgc

SEQ ID NO: 315897 - DNA, 25 bp, Probe Sequence
ttccctgaggctactttattttggt

SEQ ID NO: 315898 - DNA, 25 bp, Probe Sequence
ttctcctaggtgtttgatatttttg

SEQ ID NO: 315899 - DNA, 25 bp, Probe Sequence
ttctcgctgggatcttgatgcttgc

SEQ ID NO: 315900 - DNA, 25 bp, Probe Sequence
ttctccggagacttggtgatctgct

SEQ ID NO: 315901 - DNA, 25 bp, Probe Sequence
ttctctccggactgtgcatagcagt

SEQ ID NO: 315902 - DNA, 25 bp, Probe Sequence
ttcttcagggcatcgtgcaagaccc

SEQ ID NO: 315903 - DNA, 25 bp, Probe Sequence
ttcgtggtgagctacgccaaggacc

SEQ ID NO: 315904 - DNA, 25 bp, Probe Sequence
ttctgctgagtaccaccgcaaagcc

SEQ ID NO: 315905 - DNA, 25 bp, Probe Sequence
ttctgtgtggattcaagctcaaagc

SEQ ID NO: 315906 - DNA, 25 bp, Probe Sequence
ttctgtgtggattcaagctcaaagc

SEQ ID NO: 315907 - DNA, 25 bp, Probe Sequence
ttcggtgcagattaagagcctgggc

SEQ ID NO: 315908 - DNA, 25 bp, Probe Sequence
ttctgaattctatagtgcctgggtc

SEQ ID NO: 315909 - DNA, 25 bp, Probe Sequence
ttcttttctataatgtgcctggctc

SEQ ID NO: 315910 - DNA, 25 bp, Probe Sequence
ttcccatttgaaattgctggcgctg

SEQ ID NO: 315911 - DNA, 25 bp, Probe Sequence
ttctcaatttgaaacgagcgcagcc

SEQ ID NO: 315912 - DNA, 25 bp, Probe Sequence
ttctcgttctatatctcatcacagc

SEQ ID NO: 315913 - DNA, 25 bp, Probe Sequence
ttctggtactgaatgccgctatcac

SEQ ID NO: 315914 - DNA, 25 bp, Probe Sequence
ttctggtactgaatgccgctatcac

SEQ ID NO: 315915 - DNA, 25 bp, Probe Sequence
ttctgtacacagatccctgtgacat

SEQ ID NO: 315916 - DNA, 25 bp, Probe Sequence
ttctgctgaatgtcctgaccttgaa

SEQ ID NO: 315917 - DNA, 25 bp, Probe Sequence
ttctcagccattttgggcatatgta

SEQ ID NO: 315918 - DNA, 25 bp, Probe Sequence
ttctcagccatctttgaagcttgaa

SEQ ID NO: 315919 - DNA, 25 bp, Probe Sequence
ttctactccatagcacagttaaaaa

SEQ ID NO: 315920 - DNA, 25 bp, Probe Sequence
ttcttctccaatggatcattttaaa

SEQ ID NO: 315921 - DNA, 25 bp, Probe Sequence
ttctccctacatggtgatgtttaac

SEQ ID NO: 315922 - DNA, 25 bp, Probe Sequence
ttctctgctgtgtcactgctatgtg

SEQ ID NO: 315923 - DNA, 25 bp, Probe Sequence
ttcttgctgctgccacctaatggaa

SEQ ID NO: 315924 - DNA, 25 bp, Probe Sequence
ttcttccatgcaagcactcaaggca

SEQ ID NO: 315925 - DNA, 25 bp, Probe Sequence
ttctctcctcagactgctcaagaga

SEQ ID NO: 315926 - DNA, 25 bp, Probe Sequence
ttctgtctccagaaccacaagaact

SEQ ID NO: 315927 - DNA, 25 bp, Probe Sequence
ttgccttcctgatgtaaaaactaac

SEQ ID NO: 315928 - DNA, 25 bp, Probe Sequence
ttctcccctgaaatgaagactacat

SEQ ID NO: 315929 - DNA, 25 bp, Probe Sequence
ttcttccctggaatccagcacagac

SEQ ID NO: 315930 - DNA, 25 bp, Probe Sequence
ttctaactcaggagtcagccaactg

SEQ ID NO: 315931 - DNA, 25 bp, Probe Sequence
ttctccctcaggatatcctgaactg

SEQ ID NO: 315932 - DNA, 25 bp, Probe Sequence
ttcttcttcagcgtctacattaaca

SEQ ID NO: 315933 - DNA, 25 bp, Probe Sequence
ttcttgctgctacatgtcatcttaa

SEQ ID NO: 315934 - DNA, 25 bp, Probe Sequence
ttgcattgcagtttagacaattcca

SEQ ID NO: 315935 - DNA, 25 bp, Probe Sequence
ttctgtgctgtcctggaccatgtta

SEQ ID NO: 315936 - DNA, 25 bp, Probe Sequence
ttctgagcatacctggaaaatgctt

SEQ ID NO: 315937 - DNA, 25 bp, Probe Sequence
ttctatctacctcaacaagtttcta

SEQ ID NO: 315938 - DNA, 25 bp, Probe Sequence
ttcttctacctgagactctttattt

SEQ ID NO: 315939 - DNA, 25 bp, Probe Sequence
ttcttatactcaaaagccttttttg

SEQ ID NO: 315940 - DNA, 25 bp, Probe Sequence
ttccttaatctatagtctttgtgtg

SEQ ID NO: 315941 - DNA, 25 bp, Probe Sequence
ttcgagaacccatagccaatagagt

SEQ ID NO: 315942 - DNA, 25 bp, Probe Sequence
ttctgatgaaccttcatgaggcaga

SEQ ID NO: 315943 - DNA, 25 bp, Probe Sequence
ttctatggcacaattcagattcaga

SEQ ID NO: 315944 - DNA, 25 bp, Probe Sequence
ttctgatgtaacatgtgatacatac

SEQ ID NO: 315945 - DNA, 25 bp, Probe Sequence
ttcttctcaagcactgacactcatt

SEQ ID NO: 315946 - DNA, 25 bp, Probe Sequence
ttcttcacaatcacgacttctatgc

SEQ ID NO: 315947 - DNA, 25 bp, Probe Sequence
ttcttcacaggttccacgagtcatg

SEQ ID NO: 315948 - DNA, 25 bp, Probe Sequence
ttcttcacaggatcccagcaatgaa

SEQ ID NO: 315949 - DNA, 25 bp, Probe Sequence
ttctatcacaaccccagcagtgaaa

SEQ ID NO: 315950 - DNA, 25 bp, Probe Sequence
ttcttccccagctttgcaggatgaa

SEQ ID NO: 315951 - DNA, 25 bp, Probe Sequence
ttcttcttccattaataaatcaact

SEQ ID NO: 315952 - DNA, 25 bp, Probe Sequence
ttctttgaccagcacattaacttct

SEQ ID NO: 315953 - DNA, 25 bp, Probe Sequence
ttcggcaaacagcacactaatcctg

SEQ ID NO: 315954 - DNA, 25 bp, Probe Sequence
ttcccaaaactgtcactcagagtct

SEQ ID NO: 315955 - DNA, 25 bp, Probe Sequence
ttcccaagagccctgcaaagaaccc

SEQ ID NO: 315956 - DNA, 25 bp, Probe Sequence
ttgacccaggccatccagaaagcca

SEQ ID NO: 315957 - DNA, 25 bp, Probe Sequence
ttgtctcggcccatttgaagaccag

SEQ ID NO: 315958 - DNA, 25 bp, Probe Sequence
ttctgtggagccattttaagaactg

SEQ ID NO: 315959 - DNA, 25 bp, Probe Sequence
ttctagggcttgtattaaaccactg

SEQ ID NO: 315960 - DNA, 25 bp, Probe Sequence
ttctaggtgctatattaattcaata

SEQ ID NO: 315961 - DNA, 25 bp, Probe Sequence
ttctcagggacatatccacttcttc

SEQ ID NO: 315962 - DNA, 25 bp, Probe Sequence
ttctaaagcattttcccttgctgta

SEQ ID NO: 315963 - DNA, 25 bp, Probe Sequence
ttctcgcgagatattctccggcgga

SEQ ID NO: 315964 - DNA, 25 bp, Probe Sequence
ttctgcggacttgttctgaggccga

SEQ ID NO: 315965 - DNA, 25 bp, Probe Sequence
ttcgggccaaggacctgagacctga

SEQ ID NO: 315966 - DNA, 25 bp, Probe Sequence
ttccggtcactgttgccaaactata

SEQ ID NO: 315967 - DNA, 25 bp, Probe Sequence
ttgcctgggacttccacaaactgga

SEQ ID NO: 315968 - DNA, 25 bp, Probe Sequence
ttgccgggtcagccctgacaaaggt

SEQ ID NO: 315969 - DNA, 25 bp, Probe Sequence
ttctaagttcagttctgcaagcaag

SEQ ID NO: 315970 - DNA, 25 bp, Probe Sequence
ttctgaagatcaatttctcccaagg

SEQ ID NO: 315971 - DNA, 25 bp, Probe Sequence
ttctgaatctaagtctgcacctgca

SEQ ID NO: 315972 - DNA, 25 bp, Probe Sequence
ttctgaccaatagtgctggcaccgt

SEQ ID NO: 315973 - DNA, 25 bp, Probe Sequence
ttctaacagataggaatgacctatg

SEQ ID NO: 315974 - DNA, 25 bp, Probe Sequence
ttctcacactaaataaatctctatg

SEQ ID NO: 315975 - DNA, 25 bp, Probe Sequence
ttcgacctgaagaagactctctcct

SEQ ID NO: 315976 - DNA, 25 bp, Probe Sequence
ttctgacattaacagttttccatga

SEQ ID NO: 315977 - DNA, 25 bp, Probe Sequence
ttctggctccaactcagtgtttaag

SEQ ID NO: 315978 - DNA, 25 bp, Probe Sequence
ttctgtgcatcaacagtctgtttcc

SEQ ID NO: 315979 - DNA, 25 bp, Probe Sequence
ttctgttctccagtgttttccattt

SEQ ID NO: 315980 - DNA, 25 bp, Probe Sequence
ttctttgcttcactgcttttaatac

SEQ ID NO: 315981 - DNA, 25 bp, Probe Sequence
ttctcttctgtcttgtttggtaata

SEQ ID NO: 315982 - DNA, 25 bp, Probe Sequence
ttctcattctctttgttttgtggca

SEQ ID NO: 315983 - DNA, 25 bp, Probe Sequence
ttctcatgtgcggctggttttggac

SEQ ID NO: 315984 - DNA, 25 bp, Probe Sequence
ttctgcgtgggtggtgatgggggtt

SEQ ID NO: 315985 - DNA, 25 bp, Probe Sequence
ttctggctctgtccattgaaggggt

SEQ ID NO: 315986 - DNA, 25 bp, Probe Sequence
ttctgagctgctaccacatgacaga

SEQ ID NO: 315987 - DNA, 25 bp, Probe Sequence
ttctgacatctggctcaaaagccca

SEQ ID NO: 315988 - DNA, 25 bp, Probe Sequence
ttcttcatattccagagtcacccac

SEQ ID NO: 315989 - DNA, 25 bp, Probe Sequence
ttctgccatataaagtgacatgcac

SEQ ID NO: 315990 - DNA, 25 bp, Probe Sequence
ttcgcaatacatcatgtccgacggg

SEQ ID NO: 315991 - DNA, 25 bp, Probe Sequence
ttccacaagtactccggcagggagg

SEQ ID NO: 315992 - DNA, 25 bp, Probe Sequence
ttcgacgaggagttcaccggggagg

SEQ ID NO: 315993 - DNA, 25 bp, Probe Sequence
ttctgacagaggtgacccggcggat

SEQ ID NO: 315994 - DNA, 25 bp, Probe Sequence
ttctcagggtgacgactgccaccag

SEQ ID NO: 315995 - DNA, 25 bp, Probe Sequence
ttctcagaggattcatcctcctctc

SEQ ID NO: 315996 - DNA, 25 bp, Probe Sequence
ttgcaaatataattcctccttccca

SEQ ID NO: 315997 - DNA, 25 bp, Probe Sequence
ttccgtaaccaggtcatcattcctc

SEQ ID NO: 315998 - DNA, 25 bp, Probe Sequence
ttctattgacccactacattaccac

SEQ ID NO: 315999 - DNA, 25 bp, Probe Sequence
ttctcaagaagcaacctaccttcca

SEQ ID NO: 316000 - DNA, 25 bp, Probe Sequence
ttccggaggctaacagacctgggct

SEQ ID NO: 316001 - DNA, 25 bp, Probe Sequence
ttctcggggctttcatagcagctgg

SEQ ID NO: 316002 - DNA, 25 bp, Probe Sequence
ttctatggggcatatcattctctga

SEQ ID NO: 316003 - DNA, 25 bp, Probe Sequence
ttcttaaggctaatattccattgta

SEQ ID NO: 316004 - DNA, 25 bp, Probe Sequence
ttcttcttgagtaatcacaccattt

SEQ ID NO: 316005 - DNA, 25 bp, Probe Sequence
ttctctttggtttctcatcacattt

SEQ ID NO: 316006 - DNA, 25 bp, Probe Sequence
ttctctctgtgggttctgattcatg

SEQ ID NO: 316007 - DNA, 25 bp, Probe Sequence
ttctcactttgcatttagtcaaaag

SEQ ID NO: 316008 - DNA, 25 bp, Probe Sequence
ttctctttgagagcttggtaataag

SEQ ID NO: 316009 - DNA, 25 bp, Probe Sequence
ttctcagttgagactttcttatatg

SEQ ID NO: 316010 - DNA, 25 bp, Probe Sequence
ttctctctataagtttctgtcattg

SEQ ID NO: 316011 - DNA, 25 bp, Probe Sequence
ttctatcaaaattttcaacatatgc

SEQ ID NO: 316012 - DNA, 25 bp, Probe Sequence
ttctaatagacaagtgtaatctcac

SEQ ID NO: 316013 - DNA, 25 bp, Probe Sequence
ttctacagaaatgctctatttacaa

SEQ ID NO: 316014 - DNA, 25 bp, Probe Sequence
ttctacatacaagacttcaccataa

SEQ ID NO: 316015 - DNA, 25 bp, Probe Sequence
ttctgccaaaaatctacatgcctaa

SEQ ID NO: 316016 - DNA, 25 bp, Probe Sequence
ttctctctcagaaatcaatggcatt

SEQ ID NO: 316017 - DNA, 25 bp, Probe Sequence
ttctccagcaatgagcatagtgact

SEQ ID NO: 316018 - DNA, 25 bp, Probe Sequence
ttcttaccattcaaagtacaggatc

SEQ ID NO: 316019 - DNA, 25 bp, Probe Sequence
ttctctgaacttgagaactcagttc

SEQ ID NO: 316020 - DNA, 25 bp, Probe Sequence
ttctctgaactgcccagtacttttc

SEQ ID NO: 316021 - DNA, 25 bp, Probe Sequence
ttctcagaactgaccgtagtcactg

SEQ ID NO: 316022 - DNA, 25 bp, Probe Sequence
ttctcgacctgcaggtagtcctggc

SEQ ID NO: 316023 - DNA, 25 bp, Probe Sequence
ttctgtccctggtgtagagcctggg

SEQ ID NO: 316024 - DNA, 25 bp, Probe Sequence
ttctgttttgaaagtgaaatggggt

SEQ ID NO: 316025 - DNA, 25 bp, Probe Sequence
ttctggttattactctgaacattgt

SEQ ID NO: 316026 - DNA, 25 bp, Probe Sequence
ttgtgtgatttgtgttatactggtt

SEQ ID NO: 316027 - DNA, 25 bp, Probe Sequence
ttgacttctatgtcggtataatggc

SEQ ID NO: 316028 - DNA, 25 bp, Probe Sequence
ttctcttctatcatgagataatagg

SEQ ID NO: 316029 - DNA, 25 bp, Probe Sequence
ttctcgctcttcgtggattaacttt

SEQ ID NO: 316030 - DNA, 25 bp, Probe Sequence
ttctccttgacttgtaaaaccttga

SEQ ID NO: 316031 - DNA, 25 bp, Probe Sequence
ttctccttacttgaactcacttgaa

SEQ ID NO: 316032 - DNA, 25 bp, Probe Sequence
ttctccttcctcagaatacactctg

SEQ ID NO: 316033 - DNA, 25 bp, Probe Sequence
ttctgtttcctcttgatctcaaagc

SEQ ID NO: 316034 - DNA, 25 bp, Probe Sequence
ttctgtgtccagttttctaatgagt

SEQ ID NO: 316035 - DNA, 25 bp, Probe Sequence
ttcttttcatgatttactttcgttt

SEQ ID NO: 316036 - DNA, 25 bp, Probe Sequence
ttctttttgagatacgtttattgta

SEQ ID NO: 316037 - DNA, 25 bp, Probe Sequence
ttctgttttcagtaaagtctcgtta

SEQ ID NO: 316038 - DNA, 25 bp, Probe Sequence
ttctgtttgacaggaaaccttttca

SEQ ID NO: 316039 - DNA, 25 bp, Probe Sequence
ttctgtaatgtcaggaatttttcaa

SEQ ID NO: 316040 - DNA, 25 bp, Probe Sequence
ttctctattggctaaaatttgttta

SEQ ID NO: 316041 - DNA, 25 bp, Probe Sequence
ttgtccacgttcaggatattgttgt

SEQ ID NO: 316042 - DNA, 25 bp, Probe Sequence
ttgcccctgtacgtggattgggctg

SEQ ID NO: 316043 - DNA, 25 bp, Probe Sequence
ttccacttgaacagagaattggtag

SEQ ID NO: 316044 - DNA, 25 bp, Probe Sequence
ttccagttggacaggcctggtttga

SEQ ID NO: 316045 - DNA, 25 bp, Probe Sequence
ttctaactggaggggctctagtgct

SEQ ID NO: 316046 - DNA, 25 bp, Probe Sequence
ttcgtatctggagggttctggctgt

SEQ ID NO: 316047 - DNA, 25 bp, Probe Sequence
ttctgtatcgatgaggcttccgcca

SEQ ID NO: 316048 - DNA, 25 bp, Probe Sequence
ttctgtccgtaagtctttggccaca

SEQ ID NO: 316049 - DNA, 25 bp, Probe Sequence
ttctctcactgaaagtgcttgtggc

SEQ ID NO: 316050 - DNA, 25 bp, Probe Sequence
ttctgctactaatgacactgggtac

SEQ ID NO: 316051 - DNA, 25 bp, Probe Sequence
ttctcaatcttttagcacatgtgta

SEQ ID NO: 316052 - DNA, 25 bp, Probe Sequence
ttctagattttgtacatctcagtcc

SEQ ID NO: 316053 - DNA, 25 bp, Probe Sequence
ttctgaaattcattacatatctgtc

SEQ ID NO: 316054 - DNA, 25 bp, Probe Sequence
ttcttactgctctcacaattctaag

SEQ ID NO: 316055 - DNA, 25 bp, Probe Sequence
ttcttattggcattcaacatatgta

SEQ ID NO: 316056 - DNA, 25 bp, Probe Sequence
ttcgaaaggctagacatgatgtact

SEQ ID NO: 316057 - DNA, 25 bp, Probe Sequence
ttcgaaatggaccctgctgatggag

SEQ ID NO: 316058 - DNA, 25 bp, Probe Sequence
ttctgaacacagaagcctcttcctg

SEQ ID NO: 316059 - DNA, 25 bp, Probe Sequence
ttgttacaaggcctcagcaatccac

SEQ ID NO: 316060 - DNA, 25 bp, Probe Sequence
ttcttagagagacgcctgcagaccc

SEQ ID NO: 316061 - DNA, 25 bp, Probe Sequence
ttctgagacatttcgcctgagatat

SEQ ID NO: 316062 - DNA, 25 bp, Probe Sequence
ttctgagacatttcgcctgagatat

SEQ ID NO: 316063 - DNA, 25 bp, Probe Sequence
ttctgcagagcagtgacagccgggc

SEQ ID NO: 316064 - DNA, 25 bp, Probe Sequence
ttccagcagcggtatgttgggccag

SEQ ID NO: 316065 - DNA, 25 bp, Probe Sequence
ttctcatccttgtgttgtgaaagac

SEQ ID NO: 316066 - DNA, 25 bp, Probe Sequence
ttcttagccatgtgatctggtcaag

SEQ ID NO: 316067 - DNA, 25 bp, Probe Sequence
ttctatgagaagcgtatggccacag

SEQ ID NO: 316068 - DNA, 25 bp, Probe Sequence
ttctagagacgggttgcaatgacaa

SEQ ID NO: 316069 - DNA, 25 bp, Probe Sequence
ttctaaactgctactcatgaatgag

SEQ ID NO: 316070 - DNA, 25 bp, Probe Sequence
ttctaaagctttacatatgagaggg

SEQ ID NO: 316071 - DNA, 25 bp, Probe Sequence
ttcttaggttgattcagggagggaa

SEQ ID NO: 316072 - DNA, 25 bp, Probe Sequence
ttgctgtaggttcacggcgtggact

SEQ ID NO: 316073 - DNA, 25 bp, Probe Sequence
ttctctatagttcccgagttggccc

SEQ ID NO: 316074 - DNA, 25 bp, Probe Sequence
ttctgtataattcactattcatgga

SEQ ID NO: 316075 - DNA, 25 bp, Probe Sequence
ttctgacactttcacttttgcagat

SEQ ID NO: 316076 - DNA, 25 bp, Probe Sequence
ttctgacactttcacttttgcagat

SEQ ID NO: 316077 - DNA, 25 bp, Probe Sequence
ttctgatccttacctttgttgcagc

SEQ ID NO: 316078 - DNA, 25 bp, Probe Sequence
ttctgactttacttgtggtgtgaca

SEQ ID NO: 316079 - DNA, 25 bp, Probe Sequence
ttctcatatttttgtggcacgtgaa

SEQ ID NO: 316080 - DNA, 25 bp, Probe Sequence
ttctttttttgtccacgtatctttg

SEQ ID NO: 316081 - DNA, 25 bp, Probe Sequence
ttctccttttgcttgttagtatttt

SEQ ID NO: 316082 - DNA, 25 bp, Probe Sequence
ttctccttattctgttggcgttgtt

SEQ ID NO: 316083 - DNA, 25 bp, Probe Sequence
ttctcgattaggcgtatgggttttg

SEQ ID NO: 316084 - DNA, 25 bp, Probe Sequence
ttctcgttcgggactgagttgtgaa

SEQ ID NO: 316085 - DNA, 25 bp, Probe Sequence
ttcccagtccgaaccgttggtatca

SEQ ID NO: 316086 - DNA, 25 bp, Probe Sequence
ttcctttccaagaccgttggtgcct

SEQ ID NO: 316087 - DNA, 25 bp, Probe Sequence
ttcctttaaagttcctatttcagca

SEQ ID NO: 316088 - DNA, 25 bp, Probe Sequence
ttcctttaaagttcctatttcagca

SEQ ID NO: 316089 - DNA, 25 bp, Probe Sequence
ttcctttacaattacttggcctcag

SEQ ID NO: 316090 - DNA, 25 bp, Probe Sequence
ttcctgttactttcacctcaggtcg

SEQ ID NO: 316091 - DNA, 25 bp, Probe Sequence
ttcctttaccattaagccaggcttg

SEQ ID NO: 316092 - DNA, 25 bp, Probe Sequence
ttccatttgtcctttcagaaggccg

SEQ ID NO: 316093 - DNA, 25 bp, Probe Sequence
ttcgatgttgatgctcttgcagaag

SEQ ID NO: 316094 - DNA, 25 bp, Probe Sequence
ttgcttgcttgagcttcagcggaat

SEQ ID NO: 316095 - DNA, 25 bp, Probe Sequence
ttgctgggctaggtgcaccgtaact

SEQ ID NO: 316096 - DNA, 25 bp, Probe Sequence
ttctgaggccgaggcacctctaaga

SEQ ID NO: 316097 - DNA, 25 bp, Probe Sequence
ttctgggcctggccaggtctgagat

SEQ ID NO: 316098 - DNA, 25 bp, Probe Sequence
ttctgggcctggccaggtctgagat

SEQ ID NO: 316099 - DNA, 25 bp, Probe Sequence
ttctccagccatcaagagactgagt

SEQ ID NO: 316100 - DNA, 25 bp, Probe Sequence
ttcgccgcacatcatcagcgcgcaa

SEQ ID NO: 316101 - DNA, 25 bp, Probe Sequence
ttcgtgcacagaagtcagccgcaat

SEQ ID NO: 316102 - DNA, 25 bp, Probe Sequence
ttctgtgcacaaagtgctcccttcc

SEQ ID NO: 316103 - DNA, 25 bp, Probe Sequence
ttctgtgatcacaagaccactccat

SEQ ID NO: 316104 - DNA, 25 bp, Probe Sequence
ttcgagatcatacacctgctcacag

SEQ ID NO: 316105 - DNA, 25 bp, Probe Sequence
ttcggtcaattgtcactgtcatcag

SEQ ID NO: 316106 - DNA, 25 bp, Probe Sequence
ttcgggccatggttttcatagctct

SEQ ID NO: 316107 - DNA, 25 bp, Probe Sequence
ttctgtcccaggttcttgtaggtcg

SEQ ID NO: 316108 - DNA, 25 bp, Probe Sequence
ttctgtttcggattttaagtttgag

SEQ ID NO: 316109 - DNA, 25 bp, Probe Sequence
ttctttcccgtgaaaccagtatttg

SEQ ID NO: 316110 - DNA, 25 bp, Probe Sequence
ttccttttagttcaccagcttttga

SEQ ID NO: 316111 - DNA, 25 bp, Probe Sequence
ttcctttaacttacaaagctagttg

SEQ ID NO: 316112 - DNA, 25 bp, Probe Sequence
ttctctattacagcttaaagtatgc

SEQ ID NO: 316113 - DNA, 25 bp, Probe Sequence
ttctctatccttgctcaaaatgtgg

SEQ ID NO: 316114 - DNA, 25 bp, Probe Sequence
ttctattccattttgaaaagggtct

SEQ ID NO: 316115 - DNA, 25 bp, Probe Sequence
ttctttctgcttttaaattgtgttt

SEQ ID NO: 316116 - DNA, 25 bp, Probe Sequence
ttctcatttttccaaattctttact

SEQ ID NO: 316117 - DNA, 25 bp, Probe Sequence
ttctaattcttcctcaattccagtg

SEQ ID NO: 316118 - DNA, 25 bp, Probe Sequence
ttctgagatcttaatctaagctcca

SEQ ID NO: 316119 - DNA, 25 bp, Probe Sequence
ttctagcatcctcttaatgtgcagc

SEQ ID NO: 316120 - DNA, 25 bp, Probe Sequence
ttgtagctctgcttttggctgtacg

SEQ ID NO: 316121 - DNA, 25 bp, Probe Sequence
ttctcatctctgttttgcaggttta

SEQ ID NO: 316122 - DNA, 25 bp, Probe Sequence
ttctcttagtgatggcggcgttagg

SEQ ID NO: 316123 - DNA, 25 bp, Probe Sequence
ttctcttagtgatggcggcgttagg

SEQ ID NO: 316124 - DNA, 25 bp, Probe Sequence
ttctcttttgataatgccctttagg

SEQ ID NO: 316125 - DNA, 25 bp, Probe Sequence
ttctcttttgataatgccctttagg

SEQ ID NO: 316126 - DNA, 25 bp, Probe Sequence
ttcctggtgtgacatcggttcacag

SEQ ID NO: 316127 - DNA, 25 bp, Probe Sequence
ttcgcaggggacccgaggacgtgat

SEQ ID NO: 316128 - DNA, 25 bp, Probe Sequence
ttccggctggaaccatggagggtgt

SEQ ID NO: 316129 - DNA, 25 bp, Probe Sequence
ttcgcggggcaaaatggagctcgag

SEQ ID NO: 316130 - DNA, 25 bp, Probe Sequence
ttctccctatgacctatgtagccga

SEQ ID NO: 316131 - DNA, 25 bp, Probe Sequence
ttctcaccttatcctagaacttgag

SEQ ID NO: 316132 - DNA, 25 bp, Probe Sequence
ttccaacttaggaccaacctgagaa

SEQ ID NO: 316133 - DNA, 25 bp, Probe Sequence
ttctcaactcagagtccaaccactt

SEQ ID NO: 316134 - DNA, 25 bp, Probe Sequence
ttctaactgagttgtcctacatgca

SEQ ID NO: 316135 - DNA, 25 bp, Probe Sequence
ttctaactgagttgtcctacatgca

SEQ ID NO: 316136 - DNA, 25 bp, Probe Sequence
ttctaactgagttgtcctacatgca

SEQ ID NO: 316137 - DNA, 25 bp, Probe Sequence
ttctaactgagttgtcctacatgca

SEQ ID NO: 316138 - DNA, 25 bp, Probe Sequence
ttctgaagcgagcgtcttcgatgcc

SEQ ID NO: 316139 - DNA, 25 bp, Probe Sequence
ttcgaacgcactgatttcgaccagg

SEQ ID NO: 316140 - DNA, 25 bp, Probe Sequence
ttctagaaggcagacttagccccag

SEQ ID NO: 316141 - DNA, 25 bp, Probe Sequence
ttctaggaggagacaccatgggccc

SEQ ID NO: 316142 - DNA, 25 bp, Probe Sequence
ttctaggggagaccacaggacaccg

SEQ ID NO: 316143 - DNA, 25 bp, Probe Sequence
ttctgggggggtgatctcagagccg

SEQ ID NO: 316144 - DNA, 25 bp, Probe Sequence
ttgctgccggagcgttacatcaaac

SEQ ID NO: 316145 - DNA, 25 bp, Probe Sequence
ttctgtcaggcacccgtagaaagac

SEQ ID NO: 316146 - DNA, 25 bp, Probe Sequence
ttctggtgtcccggaaatagagacc

SEQ ID NO: 316147 - DNA, 25 bp, Probe Sequence
ttcgaaatcgcctgctacaaaaaca

SEQ ID NO: 316148 - DNA, 25 bp, Probe Sequence
ttggaataccctggccactgaaaca

SEQ ID NO: 316149 - DNA, 25 bp, Probe Sequence
ttgggaagccgaggccggtagatca

SEQ ID NO: 316150 - DNA, 25 bp, Probe Sequence
ttcggacccaaaggcgtgaacatcg

SEQ ID NO: 316151 - DNA, 25 bp, Probe Sequence
ttctggagaccatgagaccgctact

SEQ ID NO: 316152 - DNA, 25 bp, Probe Sequence
ttctgaaacagctgagaccacttgt

SEQ ID NO: 316153 - DNA, 25 bp, Probe Sequence
ttctaaccgcaatagtgactctgtg

SEQ ID NO: 316154 - DNA, 25 bp, Probe Sequence
ttctaacatagctataaggtccttg

SEQ ID NO: 316155 - DNA, 25 bp, Probe Sequence
ttctgcaacaagttagttttcaagc

SEQ ID NO: 316156 - DNA, 25 bp, Probe Sequence
ttctgaacctgatagttttcacctc

SEQ ID NO: 316157 - DNA, 25 bp, Probe Sequence
ttctgtacctgatcaagtttattgc

SEQ ID NO: 316158 - DNA, 25 bp, Probe Sequence
ttccaagctggaaccgtttatgagg

SEQ ID NO: 316159 - DNA, 25 bp, Probe Sequence
ttcgccagtgtcatcctttttggaa

SEQ ID NO: 316160 - DNA, 25 bp, Probe Sequence
ttcccgttcccagtatttgtcaaat

SEQ ID NO: 316161 - DNA, 25 bp, Probe Sequence
ttccttttccacagattgtctaaag

SEQ ID NO: 316162 - DNA, 25 bp, Probe Sequence
ttccctgtttcagagaacgtaaatg

SEQ ID NO: 316163 - DNA, 25 bp, Probe Sequence
ttctccattggcccgaaagcagtaa

SEQ ID NO: 316164 - DNA, 25 bp, Probe Sequence
ttctccaagtgccttcaaaccaaga

SEQ ID NO: 316165 - DNA, 25 bp, Probe Sequence
ttccgaaatgcactccagaagaaaa

SEQ ID NO: 316166 - DNA, 25 bp, Probe Sequence
ttccctaatgaccccatcagaaatg

SEQ ID NO: 316167 - DNA, 25 bp, Probe Sequence
ttccttcaactaccctcaaagtttg

SEQ ID NO: 316168 - DNA, 25 bp, Probe Sequence
ttcccacaagttcccttaagtcttg

SEQ ID NO: 316169 - DNA, 25 bp, Probe Sequence
ttctcccaaagtaccttgaactctt

SEQ ID NO: 316170 - DNA, 25 bp, Probe Sequence
ttgctttcagaaccacttagtcctt

SEQ ID NO: 316171 - DNA, 25 bp, Probe Sequence
ttctggtacaagcaccttatctatc

SEQ ID NO: 316172 - DNA, 25 bp, Probe Sequence
ttctggttcagacaagggactatca

SEQ ID NO: 316173 - DNA, 25 bp, Probe Sequence
ttggaagtcaatgaatggtactata

SEQ ID NO: 316174 - DNA, 25 bp, Probe Sequence
ttggacccaattctgattacttaca

SEQ ID NO: 316175 - DNA, 25 bp, Probe Sequence
ttggcaccaaatcacggactttcca

SEQ ID NO: 316176 - DNA, 25 bp, Probe Sequence
ttgcacctaaatcgacgggactttc

SEQ ID NO: 316177 - DNA, 25 bp, Probe Sequence
ttgccctaaccctagggatgattct

SEQ ID NO: 316178 - DNA, 25 bp, Probe Sequence
ttgcctgtaatcccctaataagtct

SEQ ID NO: 316179 - DNA, 25 bp, Probe Sequence
ttccgatttgcctctgagaacgatc

SEQ ID NO: 316180 - DNA, 25 bp, Probe Sequence
ttcccattctactctagaaagcatg

SEQ ID NO: 316181 - DNA, 25 bp, Probe Sequence
ttccttcagccctctaaaagcatag

SEQ ID NO: 316182 - DNA, 25 bp, Probe Sequence
ttctgtagcccctctcaaaaggagt

SEQ ID NO: 316183 - DNA, 25 bp, Probe Sequence
ttcggagcctcctcagtgaaggtgg

SEQ ID NO: 316184 - DNA, 25 bp, Probe Sequence
ttcgtgtccctctcatagggggagc

SEQ ID NO: 316185 - DNA, 25 bp, Probe Sequence
ttcgtgccctacccagaatggggag

SEQ ID NO: 316186 - DNA, 25 bp, Probe Sequence
ttctggccctgattgggcactggtg

SEQ ID NO: 316187 - DNA, 25 bp, Probe Sequence
ttctgcctccagtgagaaccgtgaa

SEQ ID NO: 316188 - DNA, 25 bp, Probe Sequence
ttctcttccggaataacgcttggcg

SEQ ID NO: 316189 - DNA, 25 bp, Probe Sequence
ttctcagtatctcattaactcattg

SEQ ID NO: 316190 - DNA, 25 bp, Probe Sequence
ttctaggatctcaattcaaatgctt

SEQ ID NO: 316191 - DNA, 25 bp, Probe Sequence
ttcgaagattcgactgcaactttga

SEQ ID NO: 316192 - DNA, 25 bp, Probe Sequence
ttctgaatcttccctgaactaccaa

SEQ ID NO: 316193 - DNA, 25 bp, Probe Sequence
ttctggccttcacccagacgaagac

SEQ ID NO: 316194 - DNA, 25 bp, Probe Sequence
ttctagccattacaagcatgacaaa

SEQ ID NO: 316195 - DNA, 25 bp, Probe Sequence
ttgaactcatctaaacacagtcaga

SEQ ID NO: 316196 - DNA, 25 bp, Probe Sequence
ttgaacggaatatcacagctgctga

SEQ ID NO: 316197 - DNA, 25 bp, Probe Sequence
ttgaagcaggatcagacccagccag

SEQ ID NO: 316198 - DNA, 25 bp, Probe Sequence
ttgcatagaatgttggccttgcagc

SEQ ID NO: 316199 - DNA, 25 bp, Probe Sequence
ttgagagttttgctctgtcacccag

SEQ ID NO: 316200 - DNA, 25 bp, Probe Sequence
ttgctgagttttctgctaccctcag

SEQ ID NO: 316201 - DNA, 25 bp, Probe Sequence
ttctcagttttgctggaggccgcaa

SEQ ID NO: 316202 - DNA, 25 bp, Probe Sequence
ttctcatgtggcttcgtgtgaaccc

SEQ ID NO: 316203 - DNA, 25 bp, Probe Sequence
ttctatgatgtttcatttgacctac

SEQ ID NO: 316204 - DNA, 25 bp, Probe Sequence
ttctctgatgttttttagtctagta

SEQ ID NO: 316205 - DNA, 25 bp, Probe Sequence
ttctcgtgctttgtgatctgttcag

SEQ ID NO: 316206 - DNA, 25 bp, Probe Sequence
ttctctggccttcagacttgatcag

SEQ ID NO: 316207 - DNA, 25 bp, Probe Sequence
ttctcggagcaaagtgacttgagca

SEQ ID NO: 316208 - DNA, 25 bp, Probe Sequence
ttctcatttgccattgacttacccc

SEQ ID NO: 316209 - DNA, 25 bp, Probe Sequence
ttgcacatcagtgttagcctttccc

SEQ ID NO: 316210 - DNA, 25 bp, Probe Sequence
ttcgtgatggtgttgatcctcttcc

SEQ ID NO: 316211 - DNA, 25 bp, Probe Sequence
ttctgcggtgtaagtcgctctgtcc

SEQ ID NO: 316212 - DNA, 25 bp, Probe Sequence
ttccggcatgcagtacagcaccgtc

SEQ ID NO: 316213 - DNA, 25 bp, Probe Sequence
ttctctgccagtgacagacaggctc

SEQ ID NO: 316214 - DNA, 25 bp, Probe Sequence
ttctcccattagacatgaaccatct

SEQ ID NO: 316215 - DNA, 25 bp, Probe Sequence
ttccactcaacagtcatcaaccact

SEQ ID NO: 316216 - DNA, 25 bp, Probe Sequence
ttccactcaacagtcatcaaccact

SEQ ID NO: 316217 - DNA, 25 bp, Probe Sequence
ttccactcaacagtcatcaaccact

SEQ ID NO: 316218 - DNA, 25 bp, Probe Sequence
ttctcccaagtgaactcacactctg

SEQ ID NO: 316219 - DNA, 25 bp, Probe Sequence
ttctcctgcaaatgcctcacaggct

SEQ ID NO: 316220 - DNA, 25 bp, Probe Sequence
ttctcctgcaaatgcctcacaggct

SEQ ID NO: 316221 - DNA, 25 bp, Probe Sequence
ttctctggcaagtgttctcagctga

SEQ ID NO: 316222 - DNA, 25 bp, Probe Sequence
ttctctggtcagtctgtgttgcatc

SEQ ID NO: 316223 - DNA, 25 bp, Probe Sequence
ttctctgcagtatctggcttgtcca

SEQ ID NO: 316224 - DNA, 25 bp, Probe Sequence
ttctgtcagtgatctttctgggcct

SEQ ID NO: 316225 - DNA, 25 bp, Probe Sequence
ttctctgcagttttctgttgggcct

SEQ ID NO: 316226 - DNA, 25 bp, Probe Sequence
ttctgccgtctgtttgagaagcgcc

SEQ ID NO: 316227 - DNA, 25 bp, Probe Sequence
ttctcagcgtgcgtcctgatgagga

SEQ ID NO: 316228 - DNA, 25 bp, Probe Sequence
ttctcatctgaggtccatgctagca

SEQ ID NO: 316229 - DNA, 25 bp, Probe Sequence
ttctcactagagactcaatgacaga

SEQ ID NO: 316230 - DNA, 25 bp, Probe Sequence
ttctctctaggaccaaactcaccac

SEQ ID NO: 316231 - DNA, 25 bp, Probe Sequence
ttctgctgtgggctatcagcctacc

SEQ ID NO: 316232 - DNA, 25 bp, Probe Sequence
ttctgtggaggactctacctaaggt

SEQ ID NO: 316233 - DNA, 25 bp, Probe Sequence
ttctggctaaatcttggtatgtggt

SEQ ID NO: 316234 - DNA, 25 bp, Probe Sequence
ttctggcagaaggttgtggtagggg

SEQ ID NO: 316235 - DNA, 25 bp, Probe Sequence
ttccggaagcggatggtctgggaga

SEQ ID NO: 316236 - DNA, 25 bp, Probe Sequence
ttcctcccaagtctggctctgggag

SEQ ID NO: 316237 - DNA, 25 bp, Probe Sequence
ttcccccaagattgtggttgccatt

SEQ ID NO: 316238 - DNA, 25 bp, Probe Sequence
ttcccccatagaaggatttcatgag

SEQ ID NO: 316239 - DNA, 25 bp, Probe Sequence
ttccccctaacagcatgtgtgcaca

SEQ ID NO: 316240 - DNA, 25 bp, Probe Sequence
ttccttttaaccaagtgagacagaa

SEQ ID NO: 316241 - DNA, 25 bp, Probe Sequence
ttccttttacaggcacgtggatgga

SEQ ID NO: 316242 - DNA, 25 bp, Probe Sequence
ttctcaccctaaggacagggtggaa

SEQ ID NO: 316243 - DNA, 25 bp, Probe Sequence
ttctcaccctaaggatcagtggtgg

SEQ ID NO: 316244 - DNA, 25 bp, Probe Sequence
ttctactctaaatttcatgggctag

SEQ ID NO: 316245 - DNA, 25 bp, Probe Sequence
ttccctgcaagattagaatggtgct

SEQ ID NO: 316246 - DNA, 25 bp, Probe Sequence
ttcccattgacgtacaatgggtgga

SEQ ID NO: 316247 - DNA, 25 bp, Probe Sequence
ttctcccaggagcaagaggagcgga

SEQ ID NO: 316248 - DNA, 25 bp, Probe Sequence
ttctctacagggcaagagtccccca

SEQ ID NO: 316249 - DNA, 25 bp, Probe Sequence
ttctcaacacgcctgacaagagccc

SEQ ID NO: 316250 - DNA, 25 bp, Probe Sequence
ttctcaacacgcctgacaagagccc

SEQ ID NO: 316251 - DNA, 25 bp, Probe Sequence
ttctcaacacgcctgacaagagccc

SEQ ID NO: 316252 - DNA, 25 bp, Probe Sequence
ttcgcaatgccgcctaaggacgaca

SEQ ID NO: 316253 - DNA, 25 bp, Probe Sequence
ttcgcctacacggacaagattgaca

SEQ ID NO: 316254 - DNA, 25 bp, Probe Sequence
ttcgacatcacgggaatgaaggagc

SEQ ID NO: 316255 - DNA, 25 bp, Probe Sequence
ttcgacatgccagactttgaggacg

SEQ ID NO: 316256 - DNA, 25 bp, Probe Sequence
ttcggcagcctaacattgttcaggc

SEQ ID NO: 316257 - DNA, 25 bp, Probe Sequence
ttctgtgcctcttagcatgcagtta

SEQ ID NO: 316258 - DNA, 25 bp, Probe Sequence
ttctgtaattcattgagcagttagc

SEQ ID NO: 316259 - DNA, 25 bp, Probe Sequence
ttctgtgaagtggatgaagactaca

SEQ ID NO: 316260 - DNA, 25 bp, Probe Sequence
ttctgtgaggctgtggccatctacg

SEQ ID NO: 316261 - DNA, 25 bp, Probe Sequence
ttctgtggtgctttgaggcccactt

SEQ ID NO: 316262 - DNA, 25 bp, Probe Sequence
ttctgctggtcttggcagtgtccgt

SEQ ID NO: 316263 - DNA, 25 bp, Probe Sequence
ttctcttgccagtgcactgggcagt

SEQ ID NO: 316264 - DNA, 25 bp, Probe Sequence
ttctgtttcagatcactgcggtggg

SEQ ID NO: 316265 - DNA, 25 bp, Probe Sequence
ttctgtcccaagtactcggtgtcag

SEQ ID NO: 316266 - DNA, 25 bp, Probe Sequence
ttcgcttcacaatgtctcgtgttcc

SEQ ID NO: 316267 - DNA, 25 bp, Probe Sequence
ttctgcttcaagttcttaggtccct

SEQ ID NO: 316268 - DNA, 25 bp, Probe Sequence
ttctccatggtgttttagagtttct

SEQ ID NO: 316269 - DNA, 25 bp, Probe Sequence
ttccactggtgtgtttgtgatcctt

SEQ ID NO: 316270 - DNA, 25 bp, Probe Sequence
ttccactggtttctgtctatgtcta

SEQ ID NO: 316271 - DNA, 25 bp, Probe Sequence
ttctcactgcttatgttcttcggga

SEQ ID NO: 316272 - DNA, 25 bp, Probe Sequence
ttccctttattgagtaccaagccat

SEQ ID NO: 316273 - DNA, 25 bp, Probe Sequence
ttcccccataggaagaacccacctg

SEQ ID NO: 316274 - DNA, 25 bp, Probe Sequence
ttccggcctgggatgcgggccaggc

SEQ ID NO: 316275 - DNA, 25 bp, Probe Sequence
ttccggcctgggatgcgggccaggc

SEQ ID NO: 316276 - DNA, 25 bp, Probe Sequence
ttcgggccggaaaggccctgcagcg

SEQ ID NO: 316277 - DNA, 25 bp, Probe Sequence
ttcgggccggaaaggccctgcagcg

SEQ ID NO: 316278 - DNA, 25 bp, Probe Sequence
ttctgggctccgtttggcaatagca

SEQ ID NO: 316279 - DNA, 25 bp, Probe Sequence
ttctggagctcaacttcttgccaac

SEQ ID NO: 316280 - DNA, 25 bp, Probe Sequence
ttctctgagtcatcattattacaat

SEQ ID NO: 316281 - DNA, 25 bp, Probe Sequence
ttctgtgactcatcaaagtgacaaa

SEQ ID NO: 316282 - DNA, 25 bp, Probe Sequence
ttcgagactcatgcacaagcttcaa

SEQ ID NO: 316283 - DNA, 25 bp, Probe Sequence
ttcggacatgactacagagctggag

SEQ ID NO: 316284 - DNA, 25 bp, Probe Sequence
ttctggagctgggctcggagggtcc

SEQ ID NO: 316285 - DNA, 25 bp, Probe Sequence
ttcgccacattggccgtgttggtct

SEQ ID NO: 316286 - DNA, 25 bp, Probe Sequence
ttcgtaaatggctggtctggctctt

SEQ ID NO: 316287 - DNA, 25 bp, Probe Sequence
ttctccaaagaggggtccgtcttag

SEQ ID NO: 316288 - DNA, 25 bp, Probe Sequence
ttgccgaaatagctggtcctttttc

SEQ ID NO: 316289 - DNA, 25 bp, Probe Sequence
ttctctggaatatatgtggccttct

SEQ ID NO: 316290 - DNA, 25 bp, Probe Sequence
ttctctgagtaattcactggtttat

SEQ ID NO: 316291 - DNA, 25 bp, Probe Sequence
ttcctggaggaatctgtgtcaatga

SEQ ID NO: 316292 - DNA, 25 bp, Probe Sequence
ttcgctggacgttaatgtgtaagta

SEQ ID NO: 316293 - DNA, 25 bp, Probe Sequence
ttcgtgaacacattcttggtaaaga

SEQ ID NO: 316294 - DNA, 25 bp, Probe Sequence
ttcgtgggctctttgggtgactgag

SEQ ID NO: 316295 - DNA, 25 bp, Probe Sequence
ttcggtggttccttggtgactggga

SEQ ID NO: 316296 - DNA, 25 bp, Probe Sequence
ttggttcagttttccggagggcgag

SEQ ID NO: 316297 - DNA, 25 bp, Probe Sequence
ttgtgaactttttgtaggggacgag

SEQ ID NO: 316298 - DNA, 25 bp, Probe Sequence
ttgtaatcctttctaaacaacagga

SEQ ID NO: 316299 - DNA, 25 bp, Probe Sequence
ttgtttccttgtactgatataaaca

SEQ ID NO: 316300 - DNA, 25 bp, Probe Sequence
ttgctttctctcattatgtaagtac

SEQ ID NO: 316301 - DNA, 25 bp, Probe Sequence
ttgcttccctgttccaggggttcca

SEQ ID NO: 316302 - DNA, 25 bp, Probe Sequence
ttggtgtccgaaccaggggctgtaa

SEQ ID NO: 316303 - DNA, 25 bp, Probe Sequence
ttgtggaagccacccgggagtttga

SEQ ID NO: 316304 - DNA, 25 bp, Probe Sequence
ttgccaaacgacacaggaaatttga

SEQ ID NO: 316305 - DNA, 25 bp, Probe Sequence
ttccaacaaaacaacgagcaagtta

SEQ ID NO: 316306 - DNA, 25 bp, Probe Sequence
ttgctaccaatatcatacgggactt

SEQ ID NO: 316307 - DNA, 25 bp, Probe Sequence
ttgggaaataactctgggatctcat

SEQ ID NO: 316308 - DNA, 25 bp, Probe Sequence
ttgggaaatacctaagaagcacctt

SEQ ID NO: 316309 - DNA, 25 bp, Probe Sequence
ttctgaaaaacttagggacatcctg

SEQ ID NO: 316310 - DNA, 25 bp, Probe Sequence
ttctcactaaaatatggggcaattg

SEQ ID NO: 316311 - DNA, 25 bp, Probe Sequence
ttctgactacatcacctatgggaat

SEQ ID NO: 316312 - DNA, 25 bp, Probe Sequence
ttctgacagactatctttggggatg

SEQ ID NO: 316313 - DNA, 25 bp, Probe Sequence
ttctgccaaccagctgcttgggatg

SEQ ID NO: 316314 - DNA, 25 bp, Probe Sequence
ttctccatacgcactggtatgtgtg

SEQ ID NO: 316315 - DNA, 25 bp, Probe Sequence
ttctcaacccagcaggtagatgggt

SEQ ID NO: 316316 - DNA, 25 bp, Probe Sequence
ttctcattcccactaggtgtcgggt

SEQ ID NO: 316317 - DNA, 25 bp, Probe Sequence
ttctcctttcactggtgttggactt

SEQ ID NO: 316318 - DNA, 25 bp, Probe Sequence
ttgccctttaacttattgggactga

SEQ ID NO: 316319 - DNA, 25 bp, Probe Sequence
ttgcctttgtaacctttgacgacca

SEQ ID NO: 316320 - DNA, 25 bp, Probe Sequence
ttgcctttgtaacctttgacgacca

SEQ ID NO: 316321 - DNA, 25 bp, Probe Sequence
ttccacgtgtaagctttgagcccta

SEQ ID NO: 316322 - DNA, 25 bp, Probe Sequence
ttccactgggaccactatcatggcc

SEQ ID NO: 316323 - DNA, 25 bp, Probe Sequence
ttccgctcgccacaaatatgggtac

SEQ ID NO: 316324 - DNA, 25 bp, Probe Sequence
ttcccgctggaggtaattggctaac

SEQ ID NO: 316325 - DNA, 25 bp, Probe Sequence
ttccctgctaaggctaaagttgatc

SEQ ID NO: 316326 - DNA, 25 bp, Probe Sequence
ttccctggatagtccaagctttgtg

SEQ ID NO: 316327 - DNA, 25 bp, Probe Sequence
ttctgccgtgttcctaacattttga

SEQ ID NO: 316328 - DNA, 25 bp, Probe Sequence
ttctgccgtttttcatagttttcac

SEQ ID NO: 316329 - DNA, 25 bp, Probe Sequence
ttcgccctattcttcatagccgaat

SEQ ID NO: 316330 - DNA, 25 bp, Probe Sequence
ttcgacctttgcagatacccataac

SEQ ID NO: 316331 - DNA, 25 bp, Probe Sequence
ttctgaccatttatacctcatataa

SEQ ID NO: 316332 - DNA, 25 bp, Probe Sequence
ttctcacctttactcctcagtaaat

SEQ ID NO: 316333 - DNA, 25 bp, Probe Sequence
ttctccacttgtagctgcactttaa

SEQ ID NO: 316334 - DNA, 25 bp, Probe Sequence
ttctcgaacatctctcagcatttac

SEQ ID NO: 316335 - DNA, 25 bp, Probe Sequence
ttctcggaattcttccatcttacca

SEQ ID NO: 316336 - DNA, 25 bp, Probe Sequence
ttctcgggtgaatgcaatttacaaa

SEQ ID NO: 316337 - DNA, 25 bp, Probe Sequence
ttctgctggtggataaacattaaaa

SEQ ID NO: 316338 - DNA, 25 bp, Probe Sequence
ttctgctggtggatttacatattaa

SEQ ID NO: 316339 - DNA, 25 bp, Probe Sequence
ttgctgaggtggatcctcactggga

SEQ ID NO: 316340 - DNA, 25 bp, Probe Sequence
ttctgggtggacgcacttggcgagc

SEQ ID NO: 316341 - DNA, 25 bp, Probe Sequence
ttcgggtggactgtctatatagtta

SEQ ID NO: 316342 - DNA, 25 bp, Probe Sequence
ttgcgggtgccaatttctacattgt

SEQ ID NO: 316343 - DNA, 25 bp, Probe Sequence
ttcgggtccaaaatctcatgaatgg

SEQ ID NO: 316344 - DNA, 25 bp, Probe Sequence
ttcgggaggcaaactcctggatgcg

SEQ ID NO: 316345 - DNA, 25 bp, Probe Sequence
ttcgcaggaaacagatctgctacag

SEQ ID NO: 316346 - DNA, 25 bp, Probe Sequence
ttcggacgcaagaagacagcgacag

SEQ ID NO: 316347 - DNA, 25 bp, Probe Sequence
ttctgtatcgtaaaaccagtctgtt

SEQ ID NO: 316348 - DNA, 25 bp, Probe Sequence
ttctgttgccgaaatagctggtcct

SEQ ID NO: 316349 - DNA, 25 bp, Probe Sequence
ttctgcttggtgattagctggacaa

SEQ ID NO: 316350 - DNA, 25 bp, Probe Sequence
ttctgctatggtctgtggttgatga

SEQ ID NO: 316351 - DNA, 25 bp, Probe Sequence
ttctgctctgtacagtggtctattt

SEQ ID NO: 316352 - DNA, 25 bp, Probe Sequence
ttctgcctgtggaagcttggcttct

SEQ ID NO: 316353 - DNA, 25 bp, Probe Sequence
ttctgccagggctagtattgcttct

SEQ ID NO: 316354 - DNA, 25 bp, Probe Sequence
ttctccacgtgctgtgttatggtcg

SEQ ID NO: 316355 - DNA, 25 bp, Probe Sequence
ttctccctgaggctggtaggtgggc

SEQ ID NO: 316356 - DNA, 25 bp, Probe Sequence
ttctccctggtggcgaggaagctga

SEQ ID NO: 316357 - DNA, 25 bp, Probe Sequence
ttccagcctgggtgacaaagcgaga

SEQ ID NO: 316358 - DNA, 25 bp, Probe Sequence
ttcctgcctgggtccccagggaagc

SEQ ID NO: 316359 - DNA, 25 bp, Probe Sequence
ttccgactgggagccggaggaacgg

SEQ ID NO: 316360 - DNA, 25 bp, Probe Sequence
ttccggtaggcttccgagaggagcc

SEQ ID NO: 316361 - DNA, 25 bp, Probe Sequence
ttccgcggaggtttcggcagtggca

SEQ ID NO: 316362 - DNA, 25 bp, Probe Sequence
ttccgccaaggacatcgacgggcac

SEQ ID NO: 316363 - DNA, 25 bp, Probe Sequence
ttccgccggggtacaggtgtggatc

SEQ ID NO: 316364 - DNA, 25 bp, Probe Sequence
ttccccagggggtagtattgatgat

SEQ ID NO: 316365 - DNA, 25 bp, Probe Sequence
ttcgcctgggttcgtagtattggat

SEQ ID NO: 316366 - DNA, 25 bp, Probe Sequence
ttccctcgtgacagtggtgtgtggt

SEQ ID NO: 316367 - DNA, 25 bp, Probe Sequence
ttccctcgtgacagtggtgtgtggt

SEQ ID NO: 316368 - DNA, 25 bp, Probe Sequence
ttccctcgtgacagtggtgtgtggt

SEQ ID NO: 316369 - DNA, 25 bp, Probe Sequence
ttccccgtgattatggggctagttg

SEQ ID NO: 316370 - DNA, 25 bp, Probe Sequence
ttcccggagttcaggtgactgaggg

SEQ ID NO: 316371 - DNA, 25 bp, Probe Sequence
ttcccaggagttgatgtttctggtc

SEQ ID NO: 316372 - DNA, 25 bp, Probe Sequence
ttcccgtggtgggttttcaggcaat

SEQ ID NO: 316373 - DNA, 25 bp, Probe Sequence
ttcccaagtggagatttaagtaata

SEQ ID NO: 316374 - DNA, 25 bp, Probe Sequence
ttccctacggatgacttctaaaaat

SEQ ID NO: 316375 - DNA, 25 bp, Probe Sequence
ttctgccttttatactgtctaaaaa

SEQ ID NO: 316376 - DNA, 25 bp, Probe Sequence
ttcccttattcctcttgctaagtac

SEQ ID NO: 316377 - DNA, 25 bp, Probe Sequence
ttctccctcactgcaacaagtaatg

SEQ ID NO: 316378 - DNA, 25 bp, Probe Sequence
ttctcaccttctgcaaccagtatgg

SEQ ID NO: 316379 - DNA, 25 bp, Probe Sequence
ttccccttctgtgtcacagttcttg

SEQ ID NO: 316380 - DNA, 25 bp, Probe Sequence
ttcccatttcgagacatcttttatt

SEQ ID NO: 316381 - DNA, 25 bp, Probe Sequence
ttccgagcattccagtaactttttt

SEQ ID NO: 316382 - DNA, 25 bp, Probe Sequence
ttgccatcatgctttaggaattttt

SEQ ID NO: 316383 - DNA, 25 bp, Probe Sequence
ttctcatctgcccattcagtatttt

SEQ ID NO: 316384 - DNA, 25 bp, Probe Sequence
ttctcatgcgagccttcattgatgt

SEQ ID NO: 316385 - DNA, 25 bp, Probe Sequence
ttctcatggagtttcttatcttttt

SEQ ID NO: 316386 - DNA, 25 bp, Probe Sequence
ttctctcagagcatgcttttcttta

SEQ ID NO: 316387 - DNA, 25 bp, Probe Sequence
ttctctctcagcatgtttcagaagt

SEQ ID NO: 316388 - DNA, 25 bp, Probe Sequence
ttctgcaactctggctttcataagt

SEQ ID NO: 316389 - DNA, 25 bp, Probe Sequence
ttctcttctgctggattatataatt

SEQ ID NO: 316390 - DNA, 25 bp, Probe Sequence
ttctcttctctccattgagtattgc

SEQ ID NO: 316391 - DNA, 25 bp, Probe Sequence
ttctctgctccttttggtgactgga

SEQ ID NO: 316392 - DNA, 25 bp, Probe Sequence
ttctcttccactgagcttcactaat

SEQ ID NO: 316393 - DNA, 25 bp, Probe Sequence
ttctgtaaatgctgcgttcctaatt

SEQ ID NO: 316394 - DNA, 25 bp, Probe Sequence
ttctgtaaatggtatgtctccttag

SEQ ID NO: 316395 - DNA, 25 bp, Probe Sequence
ttctgccagaatcaatttcctcaag

SEQ ID NO: 316396 - DNA, 25 bp, Probe Sequence
ttctccagtactgctttcttcaaac

SEQ ID NO: 316397 - DNA, 25 bp, Probe Sequence
ttcccaaactgtccatttctggaac

SEQ ID NO: 316398 - DNA, 25 bp, Probe Sequence
ttcgccaaccattccatatctgtta

SEQ ID NO: 316399 - DNA, 25 bp, Probe Sequence
ttctgccaatttactatgattgtgt

SEQ ID NO: 316400 - DNA, 25 bp, Probe Sequence
ttctgcctcaatattaatatgttgg

SEQ ID NO: 316401 - DNA, 25 bp, Probe Sequence
ttctgtgccagacttatgactttgt

SEQ ID NO: 316402 - DNA, 25 bp, Probe Sequence
ttctgcatgacaccccaaatttgat

SEQ ID NO: 316403 - DNA, 25 bp, Probe Sequence
ttcgcaatcctcagcaacatcttaa

SEQ ID NO: 316404 - DNA, 25 bp, Probe Sequence
ttccaataccggctatgttaaattt

SEQ ID NO: 316405 - DNA, 25 bp, Probe Sequence
ttccctaccgtgtttgataaatgtt

SEQ ID NO: 316406 - DNA, 25 bp, Probe Sequence
ttcccttttttctgtgaaatatgtg

SEQ ID NO: 316407 - DNA, 25 bp, Probe Sequence
ttcctcccttttttgtaaagcaatg

SEQ ID NO: 316408 - DNA, 25 bp, Probe Sequence
ttctcctccttcatcctgtaaaggt

SEQ ID NO: 316409 - DNA, 25 bp, Probe Sequence
ttctcttttctcagccttatagtag

SEQ ID NO: 316410 - DNA, 25 bp, Probe Sequence
ttcctctaactcactgcctaggagg

SEQ ID NO: 316411 - DNA, 25 bp, Probe Sequence
ttctctctatttgttcctaggtgta

SEQ ID NO: 316412 - DNA, 25 bp, Probe Sequence
ttgctcccttatgttcttcggatat

SEQ ID NO: 316413 - DNA, 25 bp, Probe Sequence
ttctcctcttaagttcattaagata

SEQ ID NO: 316414 - DNA, 25 bp, Probe Sequence
ttctcatctctaagtgcctcattga

SEQ ID NO: 316415 - DNA, 25 bp, Probe Sequence
ttctctattgcaagtcccttgtctt

SEQ ID NO: 316416 - DNA, 25 bp, Probe Sequence
ttctcttcgcatagtcacgtagctc

SEQ ID NO: 316417 - DNA, 25 bp, Probe Sequence
ttctcttcgcatagtcacgtagctc

SEQ ID NO: 316418 - DNA, 25 bp, Probe Sequence
ttctctcatcaaggctacaattgct

SEQ ID NO: 316419 - DNA, 25 bp, Probe Sequence
ttctgccacaatgccaactgatgtg

SEQ ID NO: 316420 - DNA, 25 bp, Probe Sequence
ttctctactcatgccagattttggg

SEQ ID NO: 316421 - DNA, 25 bp, Probe Sequence
ttcctagctagcttcagagccggtg

SEQ ID NO: 316422 - DNA, 25 bp, Probe Sequence
ttcctcctactgaagctacctggaa

SEQ ID NO: 316423 - DNA, 25 bp, Probe Sequence
ttccaggcccagagctacagctggg

SEQ ID NO: 316424 - DNA, 25 bp, Probe Sequence
ttccgggcctgcacggagctgggca

SEQ ID NO: 316425 - DNA, 25 bp, Probe Sequence
ttcccgtcccctgagagggatgagt

SEQ ID NO: 316426 - DNA, 25 bp, Probe Sequence
ttctccccttccgcgaggaagagat

SEQ ID NO: 316427 - DNA, 25 bp, Probe Sequence
ttctcccacttggccaagcagggag

SEQ ID NO: 316428 - DNA, 25 bp, Probe Sequence
ttctccgcacgactgttacagaggt

SEQ ID NO: 316429 - DNA, 25 bp, Probe Sequence
ttctctacatgggctttgacgaagc

SEQ ID NO: 316430 - DNA, 25 bp, Probe Sequence
ttgccttcaggagttggcggagctg

SEQ ID NO: 316431 - DNA, 25 bp, Probe Sequence
ttctgcctcgggatgagcgtggcgc

SEQ ID NO: 316432 - DNA, 25 bp, Probe Sequence
ttctctagcgggactcggcatgagg

SEQ ID NO: 316433 - DNA, 25 bp, Probe Sequence
ttcggcacggtcaacggcatgatag

SEQ ID NO: 316434 - DNA, 25 bp, Probe Sequence
ttctgtgcctttaccagtgtgtgga

SEQ ID NO: 316435 - DNA, 25 bp, Probe Sequence
ttctgtctcttatcatgttggtgga

SEQ ID NO: 316436 - DNA, 25 bp, Probe Sequence
ttctgtatctgtgaagttggcacag

SEQ ID NO: 316437 - DNA, 25 bp, Probe Sequence
ttctcttattgttcagttcatccag

SEQ ID NO: 316438 - DNA, 25 bp, Probe Sequence
ttctgtgtgttgtccagcgtattca

SEQ ID NO: 316439 - DNA, 25 bp, Probe Sequence
ttctgtgatgtttcactcggcataa

SEQ ID NO: 316440 - DNA, 25 bp, Probe Sequence
ttctgtatgtctccatctattgatg

SEQ ID NO: 316441 - DNA, 25 bp, Probe Sequence
ttctgatattgcacttcttatttta

SEQ ID NO: 316442 - DNA, 25 bp, Probe Sequence
ttctggatgatgatgattgtttatt

SEQ ID NO: 316443 - DNA, 25 bp, Probe Sequence
ttctccatatctcattgttatttac

SEQ ID NO: 316444 - DNA, 25 bp, Probe Sequence
ttctgccaatgtctcgtctattatg

SEQ ID NO: 316445 - DNA, 25 bp, Probe Sequence
ttctccgatgtctaactctttgtgc

SEQ ID NO: 316446 - DNA, 25 bp, Probe Sequence
ttccctgaggcaaaactcactggcc

SEQ ID NO: 316447 - DNA, 25 bp, Probe Sequence
ttcgcgtcatgccagcaaattccat

SEQ ID NO: 316448 - DNA, 25 bp, Probe Sequence
ttctcgtatctgccatgagttcaat

SEQ ID NO: 316449 - DNA, 25 bp, Probe Sequence
ttctctttctgaatgacttcataaa

SEQ ID NO: 316450 - DNA, 25 bp, Probe Sequence
ttcctgttgctgagacttcctggat

SEQ ID NO: 316451 - DNA, 25 bp, Probe Sequence
ttcctttcgttgctttcttgaggtc

SEQ ID NO: 316452 - DNA, 25 bp, Probe Sequence
ttccttttttcctttctggaggcat

SEQ ID NO: 316453 - DNA, 25 bp, Probe Sequence
ttccttttttcctttctggaggcat

SEQ ID NO: 316454 - DNA, 25 bp, Probe Sequence
ttcccagtttggccttttggggcat

SEQ ID NO: 316455 - DNA, 25 bp, Probe Sequence
ttcccaggattctctttgggggtca

SEQ ID NO: 316456 - DNA, 25 bp, Probe Sequence
ttcccagagttcccatttaggggtg

SEQ ID NO: 316457 - DNA, 25 bp, Probe Sequence
ttctctagaatttccagcctggtgc

SEQ ID NO: 316458 - DNA, 25 bp, Probe Sequence
ttctctttattctcagttttgcaca

SEQ ID NO: 316459 - DNA, 25 bp, Probe Sequence
ttcccttatcttactgtcattgtcc

SEQ ID NO: 316460 - DNA, 25 bp, Probe Sequence
ttccgtttgctctaataattctact

SEQ ID NO: 316461 - DNA, 25 bp, Probe Sequence
ttctgccatttcttcaaggtttact

SEQ ID NO: 316462 - DNA, 25 bp, Probe Sequence
ttcctcacttttgcagttgattact

SEQ ID NO: 316463 - DNA, 25 bp, Probe Sequence
ttctctaggtttgcatgtagctata

SEQ ID NO: 316464 - DNA, 25 bp, Probe Sequence
ttctgggagttgtactgctagtaat

SEQ ID NO: 316465 - DNA, 25 bp, Probe Sequence
ttcgggagtctgagtatagagagaa

SEQ ID NO: 316466 - DNA, 25 bp, Probe Sequence
ttctggtactctgtgaaagaagaga

SEQ ID NO: 316467 - DNA, 25 bp, Probe Sequence
ttcggttcctccacataaaacaact

SEQ ID NO: 316468 - DNA, 25 bp, Probe Sequence
ttcgcgttcctcgttaagcagaaga

SEQ ID NO: 316469 - DNA, 25 bp, Probe Sequence
ttccagcttgtcaaggagaaggaat

SEQ ID NO: 316470 - DNA, 25 bp, Probe Sequence
ttccctagtcattgggaaagtagag

SEQ ID NO: 316471 - DNA, 25 bp, Probe Sequence
ttccctcattcttattaccagtaag

SEQ ID NO: 316472 - DNA, 25 bp, Probe Sequence
ttccccttcctatagataaaagtca

SEQ ID NO: 316473 - DNA, 25 bp, Probe Sequence
ttccccattaaatcgtttacataca

SEQ ID NO: 316474 - DNA, 25 bp, Probe Sequence
ttcccctagtaatagtttgataaga

SEQ ID NO: 316475 - DNA, 25 bp, Probe Sequence
ttcctcctagtttgtagatttgcaa

SEQ ID NO: 316476 - DNA, 25 bp, Probe Sequence
ttccctctagttggcaagtctcaca

SEQ ID NO: 316477 - DNA, 25 bp, Probe Sequence
ttctcgcctacatggatagtccaca

SEQ ID NO: 316478 - DNA, 25 bp, Probe Sequence
ttctctggccaagtttcaggccaat

SEQ ID NO: 316479 - DNA, 25 bp, Probe Sequence
ttctctgtgccagatcttcagtgcc

SEQ ID NO: 316480 - DNA, 25 bp, Probe Sequence
ttctctgcccatgataatgatgcca

SEQ ID NO: 316481 - DNA, 25 bp, Probe Sequence
ttctctgctccttaaatatcatctc

SEQ ID NO: 316482 - DNA, 25 bp, Probe Sequence
ttctctaccctatgcaatgattccc

SEQ ID NO: 316483 - DNA, 25 bp, Probe Sequence
ttctctcccctttcaagtgagcaac

SEQ ID NO: 316484 - DNA, 25 bp, Probe Sequence
ttctctcccctttcaagtgagcaac

SEQ ID NO: 316485 - DNA, 25 bp, Probe Sequence
ttctctaagcgttctcacaagccag

SEQ ID NO: 316486 - DNA, 25 bp, Probe Sequence
ttctccaaggacaacagcaagccag

SEQ ID NO: 316487 - DNA, 25 bp, Probe Sequence
ttctcctatgactgatcctactatg

SEQ ID NO: 316488 - DNA, 25 bp, Probe Sequence
ttctcctcattcatatttagctcag

SEQ ID NO: 316489 - DNA, 25 bp, Probe Sequence
ttctgaccatatccttcttaacacc

SEQ ID NO: 316490 - DNA, 25 bp, Probe Sequence
ttctgtccagcatatgtaaaatccc

SEQ ID NO: 316491 - DNA, 25 bp, Probe Sequence
ttctgatcctgactttggacaaggc

SEQ ID NO: 316492 - DNA, 25 bp, Probe Sequence
ttctgtatctacttcatgctgacca

SEQ ID NO: 316493 - DNA, 25 bp, Probe Sequence
ttctgatacatctgtcagtgagtca

SEQ ID NO: 316494 - DNA, 25 bp, Probe Sequence
ttctgactcacatacagtagatcac

SEQ ID NO: 316495 - DNA, 25 bp, Probe Sequence
ttctcccacaccaagtgcatgtcag

SEQ ID NO: 316496 - DNA, 25 bp, Probe Sequence
ttctcccacactcaggtgatcgagt

SEQ ID NO: 316497 - DNA, 25 bp, Probe Sequence
ttctcctccctacagtgaggatttc

SEQ ID NO: 316498 - DNA, 25 bp, Probe Sequence
ttctgccactcctgacagggtgacc

SEQ ID NO: 316499 - DNA, 25 bp, Probe Sequence
ttctctgagacccatgatcagggga

SEQ ID NO: 316500 - DNA, 25 bp, Probe Sequence
ttctccacacaccttcagggaacat

SEQ ID NO: 316501 - DNA, 25 bp, Probe Sequence
ttctctgcccagcttggagcaggac

SEQ ID NO: 316502 - DNA, 25 bp, Probe Sequence
ttctgccccagctttgcaagatgaa

SEQ ID NO: 316503 - DNA, 25 bp, Probe Sequence
ttcgccctgccatgttagctaagtt

SEQ ID NO: 316504 - DNA, 25 bp, Probe Sequence
ttcgactcgcacttgactagtaggt

SEQ ID NO: 316505 - DNA, 25 bp, Probe Sequence
ttcgccactcatttatttgtaactt

SEQ ID NO: 316506 - DNA, 25 bp, Probe Sequence
ttccccttaacaaggatttcttatg

SEQ ID NO: 316507 - DNA, 25 bp, Probe Sequence
ttccccttaacaaggatttcttatg

SEQ ID NO: 316508 - DNA, 25 bp, Probe Sequence
ttccctctttactagagcatttcct

SEQ ID NO: 316509 - DNA, 25 bp, Probe Sequence
ttgccctcttctgcgaaataagcct

SEQ ID NO: 316510 - DNA, 25 bp, Probe Sequence
ttcctccttgccaacaaaaagccgc

SEQ ID NO: 316511 - DNA, 25 bp, Probe Sequence
ttctctctcctccaaatgacaaagt

SEQ ID NO: 316512 - DNA, 25 bp, Probe Sequence
ttgggggtgcaatataagaagttta

SEQ ID NO: 316513 - DNA, 25 bp, Probe Sequence
ttgcaaggggaggtaaagagtgttt

SEQ ID NO: 316514 - DNA, 25 bp, Probe Sequence
ttgcaaaggttgactgcaaagagcg

SEQ ID NO: 316515 - DNA, 25 bp, Probe Sequence
ttgctatcggggactacaatggcca

SEQ ID NO: 316516 - DNA, 25 bp, Probe Sequence
ttctctcgtgggagacgcaggcaca

SEQ ID NO: 316517 - DNA, 25 bp, Probe Sequence
ttccctggtgcggtaccagtgcaca

SEQ ID NO: 316518 - DNA, 25 bp, Probe Sequence
ttccctgggtagagctagcatgcca

SEQ ID NO: 316519 - DNA, 25 bp, Probe Sequence
ttctctctgaagaatacagcttgtg

SEQ ID NO: 316520 - DNA, 25 bp, Probe Sequence
ttgttctaagattaccttcttgttg

SEQ ID NO: 316521 - DNA, 25 bp, Probe Sequence
ttgtatcttagacgacctgtccaga

SEQ ID NO: 316522 - DNA, 25 bp, Probe Sequence
ttggacttcggcagtctgtccaacc

SEQ ID NO: 316523 - DNA, 25 bp, Probe Sequence
ttctgtttcggcaatttgtcctggc

SEQ ID NO: 316524 - DNA, 25 bp, Probe Sequence
ttctgtttgacgtttgagtgccggc

SEQ ID NO: 316525 - DNA, 25 bp, Probe Sequence
ttcgctctagacttttgttggtcgc

SEQ ID NO: 316526 - DNA, 25 bp, Probe Sequence
ttccactgaacacttttctggccct

SEQ ID NO: 316527 - DNA, 25 bp, Probe Sequence
ttcctctggaagcttactgttctgc

SEQ ID NO: 316528 - DNA, 25 bp, Probe Sequence
ttcccttaagctttaatcttcgtca

SEQ ID NO: 316529 - DNA, 25 bp, Probe Sequence
ttcccttaggctttagcagctttgc

SEQ ID NO: 316530 - DNA, 25 bp, Probe Sequence
ttcgccttaggcatgtgcaagtccc

SEQ ID NO: 316531 - DNA, 25 bp, Probe Sequence
ttccctcttggcagctaatgggctc

SEQ ID NO: 316532 - DNA, 25 bp, Probe Sequence
ttcccctctggagggctatggcctc

SEQ ID NO: 316533 - DNA, 25 bp, Probe Sequence
ttcccctgcaggatgtttggcgcat

SEQ ID NO: 316534 - DNA, 25 bp, Probe Sequence
ttctccatctgacattatttagact

SEQ ID NO: 316535 - DNA, 25 bp, Probe Sequence
ttctccttgctgcttataataaatt

SEQ ID NO: 316536 - DNA, 25 bp, Probe Sequence
ttccctagtgttcacaacgacttat

SEQ ID NO: 316537 - DNA, 25 bp, Probe Sequence
ttcccaggtttgtcaacgtgactgt

SEQ ID NO: 316538 - DNA, 25 bp, Probe Sequence
ttcccacgttagccaattgttcttg

SEQ ID NO: 316539 - DNA, 25 bp, Probe Sequence
ttcccacgggtgccatgaagtgtgt

SEQ ID NO: 316540 - DNA, 25 bp, Probe Sequence
ttcctcagtgggtgtgacatatttc

SEQ ID NO: 316541 - DNA, 25 bp, Probe Sequence
ttccctgagggaggcggaagtttga

SEQ ID NO: 316542 - DNA, 25 bp, Probe Sequence
ttccttgagctgtacgggaagtctc

SEQ ID NO: 316543 - DNA, 25 bp, Probe Sequence
ttccttggccagggtggcatcactc

SEQ ID NO: 316544 - DNA, 25 bp, Probe Sequence
ttcctggccaagggtaacatccccg

SEQ ID NO: 316545 - DNA, 25 bp, Probe Sequence
ttccgtcgtgagggagcacttccca

SEQ ID NO: 316546 - DNA, 25 bp, Probe Sequence
ttcctgtttgacaacgacttcccag

SEQ ID NO: 316547 - DNA, 25 bp, Probe Sequence
ttggcttttgttttactgccctaat

SEQ ID NO: 316548 - DNA, 25 bp, Probe Sequence
ttggcttttgttttactgccctaat

SEQ ID NO: 316549 - DNA, 25 bp, Probe Sequence
ttcctttttaatgagctcacccttt

SEQ ID NO: 316550 - DNA, 25 bp, Probe Sequence
ttctgcctttttaaactatcatcct

SEQ ID NO: 316551 - DNA, 25 bp, Probe Sequence
ttctgtctcttgctgagaacttgat

SEQ ID NO: 316552 - DNA, 25 bp, Probe Sequence
ttctgactcattgtgcggcactgaa

SEQ ID NO: 316553 - DNA, 25 bp, Probe Sequence
ttctgcactgaagtagcaccactaa

SEQ ID NO: 316554 - DNA, 25 bp, Probe Sequence
ttctgctctaactgatacctcaacc

SEQ ID NO: 316555 - DNA, 25 bp, Probe Sequence
ttctccttcagcttgcaaaccatac

SEQ ID NO: 316556 - DNA, 25 bp, Probe Sequence
ttctccgtgcacggcaacatcatca

SEQ ID NO: 316557 - DNA, 25 bp, Probe Sequence
ttctcctatgtcccaattctcagaa

SEQ ID NO: 316558 - DNA, 25 bp, Probe Sequence
ttctccatctctgaagatctgctca

SEQ ID NO: 316559 - DNA, 25 bp, Probe Sequence
ttctcctcttgcaaagacccataca

SEQ ID NO: 316560 - DNA, 25 bp, Probe Sequence
ttccatgttctattagctccacaaa

SEQ ID NO: 316561 - DNA, 25 bp, Probe Sequence
ttctgttctgtcatgtgccacaaaa

SEQ ID NO: 316562 - DNA, 25 bp, Probe Sequence
ttctctgtcagtagcatgatcccca

SEQ ID NO: 316563 - DNA, 25 bp, Probe Sequence
ttctgcacctgtagagatcaccaat

SEQ ID NO: 316564 - DNA, 25 bp, Probe Sequence
ttccactctgagtaaaacaagtctc

SEQ ID NO: 316565 - DNA, 25 bp, Probe Sequence
ttccctctgaaattacaaactttag

SEQ ID NO: 316566 - DNA, 25 bp, Probe Sequence
ttgcccctgtaatacataagtttat

SEQ ID NO: 316567 - DNA, 25 bp, Probe Sequence
ttccctcctggataatccaagcttt

SEQ ID NO: 316568 - DNA, 25 bp, Probe Sequence
ttccctcaagagtaactacaatctt

SEQ ID NO: 316569 - DNA, 25 bp, Probe Sequence
ttctccaaaatttatcattgccatt

SEQ ID NO: 316570 - DNA, 25 bp, Probe Sequence
ttcccaatagcactttcattgccag

SEQ ID NO: 316571 - DNA, 25 bp, Probe Sequence
ttcccttgcactgtatcatttcatg

SEQ ID NO: 316572 - DNA, 25 bp, Probe Sequence
ttccgcatgtacgctcataatcgag

SEQ ID NO: 316573 - DNA, 25 bp, Probe Sequence
ttcctcatgaagggacatcacatag

SEQ ID NO: 316574 - DNA, 25 bp, Probe Sequence
ttcctcatgaaagggacgacgggag

SEQ ID NO: 316575 - DNA, 25 bp, Probe Sequence
ttcctatgaaagaaccagagctggg

SEQ ID NO: 316576 - DNA, 25 bp, Probe Sequence
ttgccttaacacaagcctgatgggg

SEQ ID NO: 316577 - DNA, 25 bp, Probe Sequence
ttccctaccatcaagccattgtttt

SEQ ID NO: 316578 - DNA, 25 bp, Probe Sequence
ttcctctccctcagaatttgtgttt

SEQ ID NO: 316579 - DNA, 25 bp, Probe Sequence
ttcctcaccccaagaacattctaga

SEQ ID NO: 316580 - DNA, 25 bp, Probe Sequence
ttcctactccaacgtatcaccaaaa

SEQ ID NO: 316581 - DNA, 25 bp, Probe Sequence
ttcctgcgatcagaagtctacccca

SEQ ID NO: 316582 - DNA, 25 bp, Probe Sequence
ttccaggcacacttaagtacccaca

SEQ ID NO: 316583 - DNA, 25 bp, Probe Sequence
ttccaggccatgcagaaggacctca

SEQ ID NO: 316584 - DNA, 25 bp, Probe Sequence
ttccagcatccacacaagtacctgc

SEQ ID NO: 316585 - DNA, 25 bp, Probe Sequence
ttccgcactatctacctgaatactc

SEQ ID NO: 316586 - DNA, 25 bp, Probe Sequence
ttcctgcacatagacctgcagttag

SEQ ID NO: 316587 - DNA, 25 bp, Probe Sequence
ttcccaccacgactatgctgtaaga

SEQ ID NO: 316588 - DNA, 25 bp, Probe Sequence
ttccccaccgagtacgtgaagacgc

SEQ ID NO: 316589 - DNA, 25 bp, Probe Sequence
ttccctttcgagtccaggactactg

SEQ ID NO: 316590 - DNA, 25 bp, Probe Sequence
ttctgtttgctccagactggggcta

SEQ ID NO: 316591 - DNA, 25 bp, Probe Sequence
ttgctgtcgattaagaccggagctt

SEQ ID NO: 316592 - DNA, 25 bp, Probe Sequence
ttcctcaagtatagatacctcactt

SEQ ID NO: 316593 - DNA, 25 bp, Probe Sequence
ttcctacagtagaaaaccattttca

SEQ ID NO: 316594 - DNA, 25 bp, Probe Sequence
ttcccacccagaaaaggcaacttag

SEQ ID NO: 316595 - DNA, 25 bp, Probe Sequence
ttccccccgaagaggagttacagcg

SEQ ID NO: 316596 - DNA, 25 bp, Probe Sequence
ttcgctcctccctgataagagttgt

SEQ ID NO: 316597 - DNA, 25 bp, Probe Sequence
ttcggccctgacttaaaacttgtgc

SEQ ID NO: 316598 - DNA, 25 bp, Probe Sequence
ttcctgccttatttagaattctttg

SEQ ID NO: 316599 - DNA, 25 bp, Probe Sequence
ttctcctgtctaaatgaaattttgt

SEQ ID NO: 316600 - DNA, 25 bp, Probe Sequence
ttctcctttatatgactttctctga

SEQ ID NO: 316601 - DNA, 25 bp, Probe Sequence
ttcccgggattgcatctgggcttaa

SEQ ID NO: 316602 - DNA, 25 bp, Probe Sequence
ttcccgggatatcccggcctcgaag

SEQ ID NO: 316603 - DNA, 25 bp, Probe Sequence
ttccccgagaactcggcatgctcga

SEQ ID NO: 316604 - DNA, 25 bp, Probe Sequence
ttccgtgtaaactcggctcagcgca

SEQ ID NO: 316605 - DNA, 25 bp, Probe Sequence
ttccgggacaaccgcatggacaggc

SEQ ID NO: 316606 - DNA, 25 bp, Probe Sequence
ttgacgggactgggagacgacagga

SEQ ID NO: 316607 - DNA, 25 bp, Probe Sequence
ttcctggcatcacggggaagccggg

SEQ ID NO: 316608 - DNA, 25 bp, Probe Sequence
ttcgaggtcgtggaggtcctgggag

SEQ ID NO: 316609 - DNA, 25 bp, Probe Sequence
ttctgggtcgtctatgtgtcatatg

SEQ ID NO: 316610 - DNA, 25 bp, Probe Sequence
ttctgtggatattctatgacctctg

SEQ ID NO: 316611 - DNA, 25 bp, Probe Sequence
ttctgggaatgatgtaatgctctga

SEQ ID NO: 316612 - DNA, 25 bp, Probe Sequence
ttctgaaataatgctgattcctgag

SEQ ID NO: 316613 - DNA, 25 bp, Probe Sequence
ttctgaaataatgctgattcctgag

SEQ ID NO: 316614 - DNA, 25 bp, Probe Sequence
ttctgcgttttgttattcctactgc

SEQ ID NO: 316615 - DNA, 25 bp, Probe Sequence
ttctgccctatttatgtttctactc

SEQ ID NO: 316616 - DNA, 25 bp, Probe Sequence
ttctgccctatttatgtttctactc

SEQ ID NO: 316617 - DNA, 25 bp, Probe Sequence
ttctgctccatttaatttgtgctat

SEQ ID NO: 316618 - DNA, 25 bp, Probe Sequence
ttctgtctttgcgatagtttgctca

SEQ ID NO: 316619 - DNA, 25 bp, Probe Sequence
ttctgctttacctctattgccatga

SEQ ID NO: 316620 - DNA, 25 bp, Probe Sequence
ttctgctttacctctattgccatga

SEQ ID NO: 316621 - DNA, 25 bp, Probe Sequence
ttctgtgttccctttatttatgctg

SEQ ID NO: 316622 - DNA, 25 bp, Probe Sequence
ttctggatatggagtatgttttgct

SEQ ID NO: 316623 - DNA, 25 bp, Probe Sequence
ttctggttggcttgtgaggacttca

SEQ ID NO: 316624 - DNA, 25 bp, Probe Sequence
ttctggattcctagatgaggttatg

SEQ ID NO: 316625 - DNA, 25 bp, Probe Sequence
ttctggttctcaagaaaatcatcat

SEQ ID NO: 316626 - DNA, 25 bp, Probe Sequence
ttctggcttctaggacatccatgcc

SEQ ID NO: 316627 - DNA, 25 bp, Probe Sequence
ttctgcatgcttagagcatgttctt

SEQ ID NO: 316628 - DNA, 25 bp, Probe Sequence
ttctgcacttggcctgcatgactac

SEQ ID NO: 316629 - DNA, 25 bp, Probe Sequence
ttctcctcatggatgcacgcatccc

SEQ ID NO: 316630 - DNA, 25 bp, Probe Sequence
ttctgccataggaatactgtctaca

SEQ ID NO: 316631 - DNA, 25 bp, Probe Sequence
ttctgccataggaacacttctgtct

SEQ ID NO: 316632 - DNA, 25 bp, Probe Sequence
ttcccaaggacaggcttcagcatca

SEQ ID NO: 316633 - DNA, 25 bp, Probe Sequence
ttgcaaaaggaactgctccctcggc

SEQ ID NO: 316634 - DNA, 25 bp, Probe Sequence
ttgcaaaaggaactgctccctcggc

SEQ ID NO: 316635 - DNA, 25 bp, Probe Sequence
ttgcggggagacagctctctctccc

SEQ ID NO: 316636 - DNA, 25 bp, Probe Sequence
ttctggtggaccactagcttaccct

SEQ ID NO: 316637 - DNA, 25 bp, Probe Sequence
ttctgggaacgctgcaagctcttcc

SEQ ID NO: 316638 - DNA, 25 bp, Probe Sequence
ttctggggacttggctgcagttgtc

SEQ ID NO: 316639 - DNA, 25 bp, Probe Sequence
ttcccaggagcactgactgcagttg

SEQ ID NO: 316640 - DNA, 25 bp, Probe Sequence
ttcctaggagccctcatcatagctc

SEQ ID NO: 316641 - DNA, 25 bp, Probe Sequence
ttgcctaaaggactatatacatcta

SEQ ID NO: 316642 - DNA, 25 bp, Probe Sequence
ttctgctccttgcattttgacatcc

SEQ ID NO: 316643 - DNA, 25 bp, Probe Sequence
ttctcctctgcgctatgtggacatt

SEQ ID NO: 316644 - DNA, 25 bp, Probe Sequence
ttctcctctgcgctatgtggacatt

SEQ ID NO: 316645 - DNA, 25 bp, Probe Sequence
ttctcctctgcgctatgtggacatt

SEQ ID NO: 316646 - DNA, 25 bp, Probe Sequence
ttcccttctcgcttgggaactctag

SEQ ID NO: 316647 - DNA, 25 bp, Probe Sequence
ttcgccttccacatgttaacagtag

SEQ ID NO: 316648 - DNA, 25 bp, Probe Sequence
ttcctcttccacatgtttacatttg

SEQ ID NO: 316649 - DNA, 25 bp, Probe Sequence
ttctccagtaatacatgtttacttt

SEQ ID NO: 316650 - DNA, 25 bp, Probe Sequence
ttctcctaatatgctgtttccatta

SEQ ID NO: 316651 - DNA, 25 bp, Probe Sequence
ttccagtaaagcctgctgatcttaa

SEQ ID NO: 316652 - DNA, 25 bp, Probe Sequence
ttccagaataagcctcccatttcaa

SEQ ID NO: 316653 - DNA, 25 bp, Probe Sequence
ttccagaatacaaactactcccagt

SEQ ID NO: 316654 - DNA, 25 bp, Probe Sequence
ttccgtgaactttatactgtccagc

SEQ ID NO: 316655 - DNA, 25 bp, Probe Sequence
ttctgcgtgaacactgagggctcct

SEQ ID NO: 316656 - DNA, 25 bp, Probe Sequence
ttctgaaaatcactctcggactgcc

SEQ ID NO: 316657 - DNA, 25 bp, Probe Sequence
ttgccaagattaaccaggaccccca

SEQ ID NO: 316658 - DNA, 25 bp, Probe Sequence
ttcctaaatcgattcggtgctcccc

SEQ ID NO: 316659 - DNA, 25 bp, Probe Sequence
ttccccactcgttgggttcaactag

SEQ ID NO: 316660 - DNA, 25 bp, Probe Sequence
ttccccactcgttgggttcaactag

SEQ ID NO: 316661 - DNA, 25 bp, Probe Sequence
ttcccccgtgtggggtccagagtgg

SEQ ID NO: 316662 - DNA, 25 bp, Probe Sequence
ttcccctgggtcatgttgcgggtgt

SEQ ID NO: 316663 - DNA, 25 bp, Probe Sequence
ttcccctgaggacctttctgaggag

SEQ ID NO: 316664 - DNA, 25 bp, Probe Sequence
ttcccaggtgcatcgtttctagtga

SEQ ID NO: 316665 - DNA, 25 bp, Probe Sequence
ttccacatggtatagttactgagtc

SEQ ID NO: 316666 - DNA, 25 bp, Probe Sequence
ttccagtggtcttcagtctgtcgtg

SEQ ID NO: 316667 - DNA, 25 bp, Probe Sequence
ttctgcatgttgtatctagtctgat

SEQ ID NO: 316668 - DNA, 25 bp, Probe Sequence
ttcgatgcgtgtttaatgatgatga

SEQ ID NO: 316669 - DNA, 25 bp, Probe Sequence
ttccctttaatactgatgatgcaat

SEQ ID NO: 316670 - DNA, 25 bp, Probe Sequence
ttccctttgatctgtaatgcaccac

SEQ ID NO: 316671 - DNA, 25 bp, Probe Sequence
ttcccttttcaggtgatgagacaaa

SEQ ID NO: 316672 - DNA, 25 bp, Probe Sequence
ttcccgggatcacggtgaagagaca

SEQ ID NO: 316673 - DNA, 25 bp, Probe Sequence
ttcccgggatcataatgaggtgacc

SEQ ID NO: 316674 - DNA, 25 bp, Probe Sequence
ttcccgggtcattcaccaggtgaca

SEQ ID NO: 316675 - DNA, 25 bp, Probe Sequence
ttcccgggatcatcacaagacgtct

SEQ ID NO: 316676 - DNA, 25 bp, Probe Sequence
ttccctgggtaaaaagtcttctcag

SEQ ID NO: 316677 - DNA, 25 bp, Probe Sequence
ttcgccgtcctataataggctttag

SEQ ID NO: 316678 - DNA, 25 bp, Probe Sequence
ttcccatggccataaaatggcttta

SEQ ID NO: 316679 - DNA, 25 bp, Probe Sequence
ttcccttgtaaaatatttgtctgtc

SEQ ID NO: 316680 - DNA, 25 bp, Probe Sequence
ttccgttgtttgccgagtagtcttc

SEQ ID NO: 316681 - DNA, 25 bp, Probe Sequence
ttccggtgtcactgaggtggtcgtg

SEQ ID NO: 316682 - DNA, 25 bp, Probe Sequence
ttccgaggaagctaaggctgcgttg

SEQ ID NO: 316683 - DNA, 25 bp, Probe Sequence
ttcccagtcagtcaagtgcatcttc

SEQ ID NO: 316684 - DNA, 25 bp, Probe Sequence
ttcgatcctcgtcaggtgcaggtca

SEQ ID NO: 316685 - DNA, 25 bp, Probe Sequence
ttctgtctccaggaagggcagcggc

SEQ ID NO: 316686 - DNA, 25 bp, Probe Sequence
ttcgtcgccaagctgctggagggca

SEQ ID NO: 316687 - DNA, 25 bp, Probe Sequence
ttcgtcgccaagctgctggagggca

SEQ ID NO: 316688 - DNA, 25 bp, Probe Sequence
ttctgtcttaagcatcttgggtgaa

SEQ ID NO: 316689 - DNA, 25 bp, Probe Sequence
ttctggcttaacaagattgaagatg

SEQ ID NO: 316690 - DNA, 25 bp, Probe Sequence
ttctgcctctcaacatcacttgaat

SEQ ID NO: 316691 - DNA, 25 bp, Probe Sequence
ttgctgtccttaccagcttcagatc

SEQ ID NO: 316692 - DNA, 25 bp, Probe Sequence
ttgcagtacttacccttggctaaga

SEQ ID NO: 316693 - DNA, 25 bp, Probe Sequence
ttgcagtacttacccttggctaaga

SEQ ID NO: 316694 - DNA, 25 bp, Probe Sequence
ttctgaagttgctccttggccaaat

SEQ ID NO: 316695 - DNA, 25 bp, Probe Sequence
ttgtgaacaggtactttgggaaatg

SEQ ID NO: 316696 - DNA, 25 bp, Probe Sequence
ttctgcgaaagatcaaggtctgcaa

SEQ ID NO: 316697 - DNA, 25 bp, Probe Sequence
ttcgctgaaaggcatcggtgccacg

SEQ ID NO: 316698 - DNA, 25 bp, Probe Sequence
ttggtgaaagggagggcccctcatg

SEQ ID NO: 316699 - DNA, 25 bp, Probe Sequence
ttctgtaaagggggcccaactcact

SEQ ID NO: 316700 - DNA, 25 bp, Probe Sequence
ttctgaaacggcgaggaccaccaac

SEQ ID NO: 316701 - DNA, 25 bp, Probe Sequence
ttctgaaccagaaggcaggccccaa

SEQ ID NO: 316702 - DNA, 25 bp, Probe Sequence
ttctgcagaaaaatgtgggccccct

SEQ ID NO: 316703 - DNA, 25 bp, Probe Sequence
ttctgcaaatcgaggctggaccacc

SEQ ID NO: 316704 - DNA, 25 bp, Probe Sequence
ttgctgtgagggagtgctggccgca

SEQ ID NO: 316705 - DNA, 25 bp, Probe Sequence
ttctgtgaatggactctgtgtccct

SEQ ID NO: 316706 - DNA, 25 bp, Probe Sequence
ttctgtgtgtagacattgtattcca

SEQ ID NO: 316707 - DNA, 25 bp, Probe Sequence
ttcgtgggcatgatcctgattctca

SEQ ID NO: 316708 - DNA, 25 bp, Probe Sequence
ttctgtgatggttttctaatctcag

SEQ ID NO: 316709 - DNA, 25 bp, Probe Sequence
ttctgtctcgttgatctaatattga

SEQ ID NO: 316710 - DNA, 25 bp, Probe Sequence
ttcgttcgttgcttgtgggaatgca

SEQ ID NO: 316711 - DNA, 25 bp, Probe Sequence
ttctgtaagtctcttgggatcctgt

SEQ ID NO: 316712 - DNA, 25 bp, Probe Sequence
ttctgtacagggagtgaggagcctt

SEQ ID NO: 316713 - DNA, 25 bp, Probe Sequence
ttcgtagcaaggtagcagagcaggc

SEQ ID NO: 316714 - DNA, 25 bp, Probe Sequence
ttcgctactaaatgcagactggagg

SEQ ID NO: 316715 - DNA, 25 bp, Probe Sequence
ttctgtttaaatttcactgtgatgt

SEQ ID NO: 316716 - DNA, 25 bp, Probe Sequence
ttctgttttacttcatcgtgtttgg

SEQ ID NO: 316717 - DNA, 25 bp, Probe Sequence
ttctgcatttttctgccgtttttca

SEQ ID NO: 316718 - DNA, 25 bp, Probe Sequence
ttgttaattttcccctgtgttgtga

SEQ ID NO: 316719 - DNA, 25 bp, Probe Sequence
ttgtttttaattctggtctcggtgc

SEQ ID NO: 316720 - DNA, 25 bp, Probe Sequence
ttgttttgtaactttggttgatgtt

SEQ ID NO: 316721 - DNA, 25 bp, Probe Sequence
ttgtttgttatgaggtggagtttta

SEQ ID NO: 316722 - DNA, 25 bp, Probe Sequence
ttccttgttggtcagaggagtgatt

SEQ ID NO: 316723 - DNA, 25 bp, Probe Sequence
ttcctttgtctgtcgaggctgggag

SEQ ID NO: 316724 - DNA, 25 bp, Probe Sequence
ttcctatctttcttgggtgggatca

SEQ ID NO: 316725 - DNA, 25 bp, Probe Sequence
ttcctgttatttatgaacggcatca

SEQ ID NO: 316726 - DNA, 25 bp, Probe Sequence
ttgccggtatttatagcacgttaca

SEQ ID NO: 316727 - DNA, 25 bp, Probe Sequence
ttgcctactaatggaaaaggttaat

SEQ ID NO: 316728 - DNA, 25 bp, Probe Sequence
ttccttctcagccgaaacaggtcca

SEQ ID NO: 316729 - DNA, 25 bp, Probe Sequence
ttctgtttactgccacaagcactgt

SEQ ID NO: 316730 - DNA, 25 bp, Probe Sequence
ttctgtcattttcatcatagcaagt

SEQ ID NO: 316731 - DNA, 25 bp, Probe Sequence
ttctggattttcttatcacaaaaaa

SEQ ID NO: 316732 - DNA, 25 bp, Probe Sequence
ttcctttaatcttatgcaaaagaga

SEQ ID NO: 316733 - DNA, 25 bp, Probe Sequence
ttcctgtatatgttaccaataagaa

SEQ ID NO: 316734 - DNA, 25 bp, Probe Sequence
ttcctgttattgtcccctaatgata

SEQ ID NO: 316735 - DNA, 25 bp, Probe Sequence
ttcctgttattgtcccctaatgata

SEQ ID NO: 316736 - DNA, 25 bp, Probe Sequence
ttcctgttattgtcccctaatgata

SEQ ID NO: 316737 - DNA, 25 bp, Probe Sequence
ttccggctaggagagcgcagcttta

SEQ ID NO: 316738 - DNA, 25 bp, Probe Sequence
ttccggcagaacgcatccactttca

SEQ ID NO: 316739 - DNA, 25 bp, Probe Sequence
ttgcctggagaatccactcacgttc

SEQ ID NO: 316740 - DNA, 25 bp, Probe Sequence
ttcctcagaaatgctccacctgtaa

SEQ ID NO: 316741 - DNA, 25 bp, Probe Sequence
ttccttgttgatgtacccttaaatt

SEQ ID NO: 316742 - DNA, 25 bp, Probe Sequence
ttccattttatggtaggccctataa

SEQ ID NO: 316743 - DNA, 25 bp, Probe Sequence
ttccattaaagagaggccgtgtcca

SEQ ID NO: 316744 - DNA, 25 bp, Probe Sequence
ttcctttcagtaagcaacttttcca

SEQ ID NO: 316745 - DNA, 25 bp, Probe Sequence
ttcctgtttgtaatccttggttcgc

SEQ ID NO: 316746 - DNA, 25 bp, Probe Sequence
ttcgaatttgtgattttggctttgc

SEQ ID NO: 316747 - DNA, 25 bp, Probe Sequence
ttcgttttgtttattcagcttctaa

SEQ ID NO: 316748 - DNA, 25 bp, Probe Sequence
ttccttctggttctaactgctgtta

SEQ ID NO: 316749 - DNA, 25 bp, Probe Sequence
ttccttctagtttttcttgttctca

SEQ ID NO: 316750 - DNA, 25 bp, Probe Sequence
ttcctttaggtctggttgttgcacc

SEQ ID NO: 316751 - DNA, 25 bp, Probe Sequence
ttcctttgtgagtcttggttggccc

SEQ ID NO: 316752 - DNA, 25 bp, Probe Sequence
ttcgttttggttaagttggcttctg

SEQ ID NO: 316753 - DNA, 25 bp, Probe Sequence
ttcgttttggttaagttggcttctg

SEQ ID NO: 316754 - DNA, 25 bp, Probe Sequence
ttcgttttggttaagttggcttctg

SEQ ID NO: 316755 - DNA, 25 bp, Probe Sequence
ttctgttttgttttgttttgctacg

SEQ ID NO: 316756 - DNA, 25 bp, Probe Sequence
ttctgtgtccttaagtacttcctga

SEQ ID NO: 316757 - DNA, 25 bp, Probe Sequence
ttctggcccctaagtattgctgcct

SEQ ID NO: 316758 - DNA, 25 bp, Probe Sequence
ttcgagctccacttggacatgggcc

SEQ ID NO: 316759 - DNA, 25 bp, Probe Sequence
ttcgtgtctgactttgaggagctgc

SEQ ID NO: 316760 - DNA, 25 bp, Probe Sequence
ttcctgttcacttgtgcatgggcta

SEQ ID NO: 316761 - DNA, 25 bp, Probe Sequence
ttccatgtttctgatggggaagatg

SEQ ID NO: 316762 - DNA, 25 bp, Probe Sequence
ttcctgattcttaaaggtcatactt

SEQ ID NO: 316763 - DNA, 25 bp, Probe Sequence
ttcctaattctatgacagtgtacat

SEQ ID NO: 316764 - DNA, 25 bp, Probe Sequence
ttcctgcaatgctgtaaaggtacat

SEQ ID NO: 316765 - DNA, 25 bp, Probe Sequence
ttcctgctagtgcaaaaggtagatg

SEQ ID NO: 316766 - DNA, 25 bp, Probe Sequence
ttccctgaggtggctaaggagagag

SEQ ID NO: 316767 - DNA, 25 bp, Probe Sequence
ttccgtgcggatccgagaggccaag

SEQ ID NO: 316768 - DNA, 25 bp, Probe Sequence
ttccgcgtggtggctggagaccata

SEQ ID NO: 316769 - DNA, 25 bp, Probe Sequence
ttcccagtgtggtctgagagacctg

SEQ ID NO: 316770 - DNA, 25 bp, Probe Sequence
ttccctgtttgtagcaagactctga

SEQ ID NO: 316771 - DNA, 25 bp, Probe Sequence
ttccctgtttgtagcaagactctga

SEQ ID NO: 316772 - DNA, 25 bp, Probe Sequence
ttcccttcttgtagagagatggaca

SEQ ID NO: 316773 - DNA, 25 bp, Probe Sequence
ttcccttcttccaaatatgacttta

SEQ ID NO: 316774 - DNA, 25 bp, Probe Sequence
ttctgcacttttcattatatactct

SEQ ID NO: 316775 - DNA, 25 bp, Probe Sequence
ttgcatacttacctagtgaaacttt

SEQ ID NO: 316776 - DNA, 25 bp, Probe Sequence
ttgctacaaacgtctggagaaacgt

SEQ ID NO: 316777 - DNA, 25 bp, Probe Sequence
ttcgagcaccctttgtgaaaacagt

SEQ ID NO: 316778 - DNA, 25 bp, Probe Sequence
ttcgtcaaccttactgaaacacact

SEQ ID NO: 316779 - DNA, 25 bp, Probe Sequence
ttcctagagccttattagaaatgca

SEQ ID NO: 316780 - DNA, 25 bp, Probe Sequence
ttcctagagtcaaccaaagatcagc

SEQ ID NO: 316781 - DNA, 25 bp, Probe Sequence
ttcctgggctgatccacaacatgac

SEQ ID NO: 316782 - DNA, 25 bp, Probe Sequence
ttcctgggctggctcaagaagcacg

SEQ ID NO: 316783 - DNA, 25 bp, Probe Sequence
ttcgtgtgacgtctgcgcagaaaca

SEQ ID NO: 316784 - DNA, 25 bp, Probe Sequence
ttcggatcacgcccggagtagaagc

SEQ ID NO: 316785 - DNA, 25 bp, Probe Sequence
ttccagaccgcggcctaataatgag

SEQ ID NO: 316786 - DNA, 25 bp, Probe Sequence
ttgacatcccggacgccaagaagag

SEQ ID NO: 316787 - DNA, 25 bp, Probe Sequence
ttgtctcaacggcagcgacgaagag

SEQ ID NO: 316788 - DNA, 25 bp, Probe Sequence
ttgctctaccggcaccggaacagca

SEQ ID NO: 316789 - DNA, 25 bp, Probe Sequence
ttgacttcaagggacggaaacatca

SEQ ID NO: 316790 - DNA, 25 bp, Probe Sequence
ttgacttcacggggattccagtctc

SEQ ID NO: 316791 - DNA, 25 bp, Probe Sequence
ttgacgtcaggcaggctatgccctt

SEQ ID NO: 316792 - DNA, 25 bp, Probe Sequence
ttgaaggcaggaaccaagcccttta

SEQ ID NO: 316793 - DNA, 25 bp, Probe Sequence
ttgacgacgaaaacacagcccagtt

SEQ ID NO: 316794 - DNA, 25 bp, Probe Sequence
ttgagcgtccaaaaaccctgagtgt

SEQ ID NO: 316795 - DNA, 25 bp, Probe Sequence
ttggtatgctaaaaagttctgaatt

SEQ ID NO: 316796 - DNA, 25 bp, Probe Sequence
ttctgatagtgaaaaggttctgtca

SEQ ID NO: 316797 - DNA, 25 bp, Probe Sequence
ttctgattgttgtatagctttcgat

SEQ ID NO: 316798 - DNA, 25 bp, Probe Sequence
ttctgtgtgctttcaaccaatcgta

SEQ ID NO: 316799 - DNA, 25 bp, Probe Sequence
ttcgttcttggcaccatcttatgaa

SEQ ID NO: 316800 - DNA, 25 bp, Probe Sequence
ttccttttgtcccatacgtcatgaa

SEQ ID NO: 316801 - DNA, 25 bp, Probe Sequence
ttccttatggggctgcaggtcatca

SEQ ID NO: 316802 - DNA, 25 bp, Probe Sequence
ttgcctacagtggggtgcagtccaa

SEQ ID NO: 316803 - DNA, 25 bp, Probe Sequence
ttcctgatcctgcgggcaagctaaa

SEQ ID NO: 316804 - DNA, 25 bp, Probe Sequence
ttgcctgcattaccggtcgatgcaa

SEQ ID NO: 316805 - DNA, 25 bp, Probe Sequence
ttgcctgcgaggctggccgagaaat

SEQ ID NO: 316806 - DNA, 25 bp, Probe Sequence
ttccctgtggaattgccgagaaatc

SEQ ID NO: 316807 - DNA, 25 bp, Probe Sequence
ttccctgtggaattgccgagaaatc

SEQ ID NO: 316808 - DNA, 25 bp, Probe Sequence
ttgtttctggcatcctaaatcaacg

SEQ ID NO: 316809 - DNA, 25 bp, Probe Sequence
ttgatgtactttacctgaaacaacc

SEQ ID NO: 316810 - DNA, 25 bp, Probe Sequence
ttgagaattcttgcctaggaaaaca

SEQ ID NO: 316811 - DNA, 25 bp, Probe Sequence
ttgagactttttggtggatgtaaat

SEQ ID NO: 316812 - DNA, 25 bp, Probe Sequence
ttgaacttgtttggaacttgtcata

SEQ ID NO: 316813 - DNA, 25 bp, Probe Sequence
ttgaacccatttgaggttcttcaga

SEQ ID NO: 316814 - DNA, 25 bp, Probe Sequence
ttgaaccagcacacagggctatttc

SEQ ID NO: 316815 - DNA, 25 bp, Probe Sequence
ttccctcagcagaaacgtgtttatc

SEQ ID NO: 316816 - DNA, 25 bp, Probe Sequence
ttcctctggaaacctctgttttctt

SEQ ID NO: 316817 - DNA, 25 bp, Probe Sequence
ttcctctggaaacctctgttttctt

SEQ ID NO: 316818 - DNA, 25 bp, Probe Sequence
ttcctaaatactccatctgtttagt

SEQ ID NO: 316819 - DNA, 25 bp, Probe Sequence
ttgactaacccaggacagtttcagt

SEQ ID NO: 316820 - DNA, 25 bp, Probe Sequence
ttcctacccacagcagcaaatgaca

SEQ ID NO: 316821 - DNA, 25 bp, Probe Sequence
ttcggccttcacgcataaaggcagt

SEQ ID NO: 316822 - DNA, 25 bp, Probe Sequence
ttccgctcttcattggaaaagtggt

SEQ ID NO: 316823 - DNA, 25 bp, Probe Sequence
ttccctgcagtatgagaaaagcgga

SEQ ID NO: 316824 - DNA, 25 bp, Probe Sequence
ttccctcctgactatgaccagcagg

SEQ ID NO: 316825 - DNA, 25 bp, Probe Sequence
ttccctcctgactatgaccagcagg

SEQ ID NO: 316826 - DNA, 25 bp, Probe Sequence
ttcccccagaattatctgccaaggg

SEQ ID NO: 316827 - DNA, 25 bp, Probe Sequence
ttcccacctatgtctttccaaggga

SEQ ID NO: 316828 - DNA, 25 bp, Probe Sequence
ttccgcagacttctttctgcaaatt

SEQ ID NO: 316829 - DNA, 25 bp, Probe Sequence
ttcccaagctagactgtgtctgaat

SEQ ID NO: 316830 - DNA, 25 bp, Probe Sequence
ttcgcccgctcagatgaactgacca

SEQ ID NO: 316831 - DNA, 25 bp, Probe Sequence
ttctggcatcctaaatcaacgggac

SEQ ID NO: 316832 - DNA, 25 bp, Probe Sequence
ttgtggcacctagatcgacgggact

SEQ ID NO: 316833 - DNA, 25 bp, Probe Sequence
ttgggcaccaaatcaacgggacttt

SEQ ID NO: 316834 - DNA, 25 bp, Probe Sequence
ttggcaccaaaatcaacgggacttt

SEQ ID NO: 316835 - DNA, 25 bp, Probe Sequence
ttggcacgcgaaagtcaacgggact

SEQ ID NO: 316836 - DNA, 25 bp, Probe Sequence
ttgccccagagaagctactcggcca

SEQ ID NO: 316837 - DNA, 25 bp, Probe Sequence
ttcccgggatccaattctggacaca

SEQ ID NO: 316838 - DNA, 25 bp, Probe Sequence
ttcccgggatctcctactgtgaaga

SEQ ID NO: 316839 - DNA, 25 bp, Probe Sequence
ttccttgggtcttccggtaggagct

SEQ ID NO: 316840 - DNA, 25 bp, Probe Sequence
ttccttgggtcttctcaggaccgta

SEQ ID NO: 316841 - DNA, 25 bp, Probe Sequence
ttcctgtggtttttcacccaagaag

SEQ ID NO: 316842 - DNA, 25 bp, Probe Sequence
ttcctgtggggctcaccccaaagta

SEQ ID NO: 316843 - DNA, 25 bp, Probe Sequence
ttcctgtggaggtggctttcagaag

SEQ ID NO: 316844 - DNA, 25 bp, Probe Sequence
ttccatggggtgagacttgagcaga

SEQ ID NO: 316845 - DNA, 25 bp, Probe Sequence
ttccgcggattcccagcttgagaaa

SEQ ID NO: 316846 - DNA, 25 bp, Probe Sequence
ttccagggcatttgtcacttaccaa

SEQ ID NO: 316847 - DNA, 25 bp, Probe Sequence
ttccaggatgctgataacttctgcc

SEQ ID NO: 316848 - DNA, 25 bp, Probe Sequence
ttcctggtatgctctactttgacac

SEQ ID NO: 316849 - DNA, 25 bp, Probe Sequence
ttcctggtgtgcagtactgctgtag

SEQ ID NO: 316850 - DNA, 25 bp, Probe Sequence
ttcctaatgctcagaacatggatga

SEQ ID NO: 316851 - DNA, 25 bp, Probe Sequence
ttcctaatgctcagaacatggatga

SEQ ID NO: 316852 - DNA, 25 bp, Probe Sequence
ttcctatatatcagcaataagaaag

SEQ ID NO: 316853 - DNA, 25 bp, Probe Sequence
ttccatattgtctgcactgaaggca

SEQ ID NO: 316854 - DNA, 25 bp, Probe Sequence
ttcctcttgctcttacagaaacctg

SEQ ID NO: 316855 - DNA, 25 bp, Probe Sequence
ttcctctgactcctagcaaggaagg

SEQ ID NO: 316856 - DNA, 25 bp, Probe Sequence
ttcctccactggtacacaggcgagg

SEQ ID NO: 316857 - DNA, 25 bp, Probe Sequence
ttcctccagaagtcttcaccagggt

SEQ ID NO: 316858 - DNA, 25 bp, Probe Sequence
ttcccacagacatcttacacttgct

SEQ ID NO: 316859 - DNA, 25 bp, Probe Sequence
ttccctgcaaattatgtcaagcttc

SEQ ID NO: 316860 - DNA, 25 bp, Probe Sequence
ttcccgcagaacctgaagatgttcg

SEQ ID NO: 316861 - DNA, 25 bp, Probe Sequence
ttcccgaaacttggtgtctatcact

SEQ ID NO: 316862 - DNA, 25 bp, Probe Sequence
ttcctctacagaagtggtgtctact

SEQ ID NO: 316863 - DNA, 25 bp, Probe Sequence
ttcctgctagatttcgtattctagt

SEQ ID NO: 316864 - DNA, 25 bp, Probe Sequence
ttccctgagatgaatctggaatcgg

SEQ ID NO: 316865 - DNA, 25 bp, Probe Sequence
ttccagctgagacactgtgatttta

SEQ ID NO: 316866 - DNA, 25 bp, Probe Sequence
ttccagctggcaacacgtttgcaaa

SEQ ID NO: 316867 - DNA, 25 bp, Probe Sequence
ttccaccacaatccagtaagcataa

SEQ ID NO: 316868 - DNA, 25 bp, Probe Sequence
ttcccaagtatgccttaagcagaac

SEQ ID NO: 316869 - DNA, 25 bp, Probe Sequence
ttcctcaaggtgctgaaccgcgcac

SEQ ID NO: 316870 - DNA, 25 bp, Probe Sequence
ttcctgaagggggacactccatgag

SEQ ID NO: 316871 - DNA, 25 bp, Probe Sequence
ttccttagaaggtcacactcacagt

SEQ ID NO: 316872 - DNA, 25 bp, Probe Sequence
ttccatcaagactgtgcacccaggc

SEQ ID NO: 316873 - DNA, 25 bp, Probe Sequence
ttccagcggatgtcgtgaaccttca

SEQ ID NO: 316874 - DNA, 25 bp, Probe Sequence
ttccagccgtgggcaaaccctgaag

SEQ ID NO: 316875 - DNA, 25 bp, Probe Sequence
ttccccgtagtctgtggcagtgaac

SEQ ID NO: 316876 - DNA, 25 bp, Probe Sequence
ttccccagtagcattgtccgagagg

SEQ ID NO: 316877 - DNA, 25 bp, Probe Sequence
ttccccagctccatggtgtcgggga

SEQ ID NO: 316878 - DNA, 25 bp, Probe Sequence
ttccctactccatgggctggcatgg

SEQ ID NO: 316879 - DNA, 25 bp, Probe Sequence
ttccctgtcttcatggggcgagtat

SEQ ID NO: 316880 - DNA, 25 bp, Probe Sequence
ttccctctctttggcgggtggaaga

SEQ ID NO: 316881 - DNA, 25 bp, Probe Sequence
ttccggccgttggctgagggtggga

SEQ ID NO: 316882 - DNA, 25 bp, Probe Sequence
ttccctccagtcttctgagggatag

SEQ ID NO: 316883 - DNA, 25 bp, Probe Sequence
ttgccctgaacttgtccgggtaggg

SEQ ID NO: 316884 - DNA, 25 bp, Probe Sequence
ttccttgagactttcctaggtggaa

SEQ ID NO: 316885 - DNA, 25 bp, Probe Sequence
ttcctctcagaggtgttctaaggga

SEQ ID NO: 316886 - DNA, 25 bp, Probe Sequence
ttcctctcatggggtcaggcataga

SEQ ID NO: 316887 - DNA, 25 bp, Probe Sequence
ttgcctatcaggacccagaattact

SEQ ID NO: 316888 - DNA, 25 bp, Probe Sequence
ttcctagcatggtcctcaatgcctt

SEQ ID NO: 316889 - DNA, 25 bp, Probe Sequence
ttccagagcctgtctgctatagctc

SEQ ID NO: 316890 - DNA, 25 bp, Probe Sequence
ttccaatgcactcccttagacaggg

SEQ ID NO: 316891 - DNA, 25 bp, Probe Sequence
ttgctcgtccatccctcaagagaga

SEQ ID NO: 316892 - DNA, 25 bp, Probe Sequence
ttcccatccacaggatagcatggag

SEQ ID NO: 316893 - DNA, 25 bp, Probe Sequence
ttgcctcattcacagcggaggtgag

SEQ ID NO: 316894 - DNA, 25 bp, Probe Sequence
ttccgcattcagtccttgtggatga

SEQ ID NO: 316895 - DNA, 25 bp, Probe Sequence
ttcgttgctcgctactttgatgaac

SEQ ID NO: 316896 - DNA, 25 bp, Probe Sequence
ttctgtcaacactaatgaagtcaac

SEQ ID NO: 316897 - DNA, 25 bp, Probe Sequence
ttctgtcctaccatgcaaatacaca

SEQ ID NO: 316898 - DNA, 25 bp, Probe Sequence
ttctgtccttctttaagacacagac

SEQ ID NO: 316899 - DNA, 25 bp, Probe Sequence
ttctgtggcttctgtaagtcctcca

SEQ ID NO: 316900 - DNA, 25 bp, Probe Sequence
ttcgtggtcatcttgggggactcca

SEQ ID NO: 316901 - DNA, 25 bp, Probe Sequence
ttcctcctgtcatggtgggattgcc

SEQ ID NO: 316902 - DNA, 25 bp, Probe Sequence
ttgcctgggatatgagccggtggcc

SEQ ID NO: 316903 - DNA, 25 bp, Probe Sequence
ttctgtgggcagtagccctgtgtgg

SEQ ID NO: 316904 - DNA, 25 bp, Probe Sequence
ttctggtgaagctctctgcagctgt

SEQ ID NO: 316905 - DNA, 25 bp, Probe Sequence
ttctggtgaagctctctgcagctgt

SEQ ID NO: 316906 - DNA, 25 bp, Probe Sequence
ttctgtgctaagggtccagtattta

SEQ ID NO: 316907 - DNA, 25 bp, Probe Sequence
ttcctgcaagggcaccagttgtatg

SEQ ID NO: 316908 - DNA, 25 bp, Probe Sequence
ttccacagaggggatctttctgttg

SEQ ID NO: 316909 - DNA, 25 bp, Probe Sequence
ttccaagagtctggtttagggctgg

SEQ ID NO: 316910 - DNA, 25 bp, Probe Sequence
ttccaggagtctggtttagggctgg

SEQ ID NO: 316911 - DNA, 25 bp, Probe Sequence
ttccagtcgaatgctgaaccgcgct

SEQ ID NO: 316912 - DNA, 25 bp, Probe Sequence
ttccagggaatgaagaagctctcct

SEQ ID NO: 316913 - DNA, 25 bp, Probe Sequence
ttcctaggactagggcccatcactg

SEQ ID NO: 316914 - DNA, 25 bp, Probe Sequence
ttcctaggactagggcccatcactg

SEQ ID NO: 316915 - DNA, 25 bp, Probe Sequence
ttgctggggacgggggccccagtca

SEQ ID NO: 316916 - DNA, 25 bp, Probe Sequence
ttggcggtgacaggggtgcgcccaa

SEQ ID NO: 316917 - DNA, 25 bp, Probe Sequence
ttctggaatccgtgagtgcctccaa

SEQ ID NO: 316918 - DNA, 25 bp, Probe Sequence
ttctggatataacttgggcacctcc

SEQ ID NO: 316919 - DNA, 25 bp, Probe Sequence
ttctggcttcagtctggaagatccc

SEQ ID NO: 316920 - DNA, 25 bp, Probe Sequence
ttctgtgcctcatcatgcaaggatc

SEQ ID NO: 316921 - DNA, 25 bp, Probe Sequence
ttctgtgcactagccatagctggtg

SEQ ID NO: 316922 - DNA, 25 bp, Probe Sequence
ttctgtccaagccagcatggtggct

SEQ ID NO: 316923 - DNA, 25 bp, Probe Sequence
ttctgtgcccaccgtgagggctgag

SEQ ID NO: 316924 - DNA, 25 bp, Probe Sequence
ttcgtgcccaaggaggaactgcagg

SEQ ID NO: 316925 - DNA, 25 bp, Probe Sequence
ttcccgatctaggagaactctcacg

SEQ ID NO: 316926 - DNA, 25 bp, Probe Sequence
ttcgccgagagggtgacctctctgg

SEQ ID NO: 316927 - DNA, 25 bp, Probe Sequence
ttcccgagagtaaatcatctttcca

SEQ ID NO: 316928 - DNA, 25 bp, Probe Sequence
ttcccaactcataaattgctttcct

SEQ ID NO: 316929 - DNA, 25 bp, Probe Sequence
ttcctcaaacttgttgctttacact

SEQ ID NO: 316930 - DNA, 25 bp, Probe Sequence
ttccttacagcttccttgtaaccac

SEQ ID NO: 316931 - DNA, 25 bp, Probe Sequence
ttcctcaatcgctttttggacctga

SEQ ID NO: 316932 - DNA, 25 bp, Probe Sequence
ttcctcagctccttgatttgtgacc

SEQ ID NO: 316933 - DNA, 25 bp, Probe Sequence
ttcgtctgcctgttttgtggactgg

SEQ ID NO: 316934 - DNA, 25 bp, Probe Sequence
ttctgtgctgttgtaggtggcctag

SEQ ID NO: 316935 - DNA, 25 bp, Probe Sequence
ttctgtggattttactggtcccagc

SEQ ID NO: 316936 - DNA, 25 bp, Probe Sequence
ttgcttggattgctacatggacccc

SEQ ID NO: 316937 - DNA, 25 bp, Probe Sequence
ttgcattaagtcctccatatgacca

SEQ ID NO: 316938 - DNA, 25 bp, Probe Sequence
ttgttaactgtgatatgcatacact

SEQ ID NO: 316939 - DNA, 25 bp, Probe Sequence
ttgtttccatctaaagtgccctata

SEQ ID NO: 316940 - DNA, 25 bp, Probe Sequence
ttgattcatctgtaaaagggtctag

SEQ ID NO: 316941 - DNA, 25 bp, Probe Sequence
ttgttgttgggaaagggctttcgag

SEQ ID NO: 316942 - DNA, 25 bp, Probe Sequence
ttgtatctttggaggggttttggtg

SEQ ID NO: 316943 - DNA, 25 bp, Probe Sequence
ttccatttatggagggctctctttc

SEQ ID NO: 316944 - DNA, 25 bp, Probe Sequence
ttcgttgctttcttgaggtcttttt

SEQ ID NO: 316945 - DNA, 25 bp, Probe Sequence
ttctggttattccggtggttgtcct

SEQ ID NO: 316946 - DNA, 25 bp, Probe Sequence
ttgcggaccattccgaggggagtcc

SEQ ID NO: 316947 - DNA, 25 bp, Probe Sequence
ttcggaggaacccagagcggaggct

SEQ ID NO: 316948 - DNA, 25 bp, Probe Sequence
ttgagccagggagacaagggagtcg

SEQ ID NO: 316949 - DNA, 25 bp, Probe Sequence
ttcctcagggctgccctgggagctc

SEQ ID NO: 316950 - DNA, 25 bp, Probe Sequence
ttcccgggatacactgggtgctggt

SEQ ID NO: 316951 - DNA, 25 bp, Probe Sequence
ttcccgggatagcccatgtgtgttg

SEQ ID NO: 316952 - DNA, 25 bp, Probe Sequence
ttcccgggatatctttctgtttatg

SEQ ID NO: 316953 - DNA, 25 bp, Probe Sequence
ttcccgggatattggttatggttca

SEQ ID NO: 316954 - DNA, 25 bp, Probe Sequence
ttcccttgccgttggctttggatgt

SEQ ID NO: 316955 - DNA, 25 bp, Probe Sequence
ttcccttgccgttggctttggatgt

SEQ ID NO: 316956 - DNA, 25 bp, Probe Sequence
ttcccttgccgttggctttggatgt

SEQ ID NO: 316957 - DNA, 25 bp, Probe Sequence
ttccatttggcactatggtttgttg

SEQ ID NO: 316958 - DNA, 25 bp, Probe Sequence
ttcctttgagcagtgatagttgtgt

SEQ ID NO: 316959 - DNA, 25 bp, Probe Sequence
ttcgttatgagaaacatttggtgcc

SEQ ID NO: 316960 - DNA, 25 bp, Probe Sequence
ttccttgggaaattattgtggcctt

SEQ ID NO: 316961 - DNA, 25 bp, Probe Sequence
ttccttgctggataagttgaagcgt

SEQ ID NO: 316962 - DNA, 25 bp, Probe Sequence
ttccttgagctgtaaatctgtgact

SEQ ID NO: 316963 - DNA, 25 bp, Probe Sequence
ttcctgtcagcgtttttgagtctgt

SEQ ID NO: 316964 - DNA, 25 bp, Probe Sequence
ttccttcctgagttcttggtttcga

SEQ ID NO: 316965 - DNA, 25 bp, Probe Sequence
ttccagctccttggtgttggtttgc

SEQ ID NO: 316966 - DNA, 25 bp, Probe Sequence
ttccaggtcttcttctaagcttttt

SEQ ID NO: 316967 - DNA, 25 bp, Probe Sequence
ttcccgtttcttaagttgtcatttg

SEQ ID NO: 316968 - DNA, 25 bp, Probe Sequence
ttgcccgtgttctcacagttattaa

SEQ ID NO: 316969 - DNA, 25 bp, Probe Sequence
ttcccgtgttctaatgtattttgac

SEQ ID NO: 316970 - DNA, 25 bp, Probe Sequence
ttcccgtttgtcacttttctgataa

SEQ ID NO: 316971 - DNA, 25 bp, Probe Sequence
ttcccgatttgtagcactttgttga

SEQ ID NO: 316972 - DNA, 25 bp, Probe Sequence
ttgccacgttgggtcagttttagaa

SEQ ID NO: 316973 - DNA, 25 bp, Probe Sequence
ttgtcaagtctttttcagtttaaca

SEQ ID NO: 316974 - DNA, 25 bp, Probe Sequence
ttggctcctcctctggaggttaaaa

SEQ ID NO: 316975 - DNA, 25 bp, Probe Sequence
ttgagcccccgtatgagaataaata

SEQ ID NO: 316976 - DNA, 25 bp, Probe Sequence
ttggccaggccacagtaaaacaagt

SEQ ID NO: 316977 - DNA, 25 bp, Probe Sequence
ttgggggctggctgaggaaaaatgt

SEQ ID NO: 316978 - DNA, 25 bp, Probe Sequence
ttgggggtgctctcagaaggaacct

SEQ ID NO: 316979 - DNA, 25 bp, Probe Sequence
ttgccgggtggctctaaggaatgac

SEQ ID NO: 316980 - DNA, 25 bp, Probe Sequence
ttccggagtagccctcggtgaagcc

SEQ ID NO: 316981 - DNA, 25 bp, Probe Sequence
ttcccagagtcatcctcgggtgatg

SEQ ID NO: 316982 - DNA, 25 bp, Probe Sequence
ttcccagagtcaacctcctgtgaca

SEQ ID NO: 316983 - DNA, 25 bp, Probe Sequence
ttcccataggaagcacctgagagat

SEQ ID NO: 316984 - DNA, 25 bp, Probe Sequence
ttcccggagagggcacctacacagt

SEQ ID NO: 316985 - DNA, 25 bp, Probe Sequence
ttcccgggatgttgactattctcta

SEQ ID NO: 316986 - DNA, 25 bp, Probe Sequence
ttcccgggatgatagaagttctcac

SEQ ID NO: 316987 - DNA, 25 bp, Probe Sequence
ttcccgggatggaatgcacagtgtt

SEQ ID NO: 316988 - DNA, 25 bp, Probe Sequence
ttcccatgagtgtgatccacattgt

SEQ ID NO: 316989 - DNA, 25 bp, Probe Sequence
ttccattgtatgcatgtgccacatt

SEQ ID NO: 316990 - DNA, 25 bp, Probe Sequence
ttccatcagggccatgttgcctgtc

SEQ ID NO: 316991 - DNA, 25 bp, Probe Sequence
ttcgccatgaggctgttgccagtgc

SEQ ID NO: 316992 - DNA, 25 bp, Probe Sequence
ttcccacagcagctttgctcagtga

SEQ ID NO: 316993 - DNA, 25 bp, Probe Sequence
ttccccacggttatatgtgtgtccc

SEQ ID NO: 316994 - DNA, 25 bp, Probe Sequence
ttccctcccgaattctatgagcatg

SEQ ID NO: 316995 - DNA, 25 bp, Probe Sequence
ttccctcccgaattctatgagcatg

SEQ ID NO: 316996 - DNA, 25 bp, Probe Sequence
ttcctgccccaaaccgataagtgca

SEQ ID NO: 316997 - DNA, 25 bp, Probe Sequence
ttccccctctgaaccgtgaatcaga

SEQ ID NO: 316998 - DNA, 25 bp, Probe Sequence
ttccctctcaaaaccagaacatcaa

SEQ ID NO: 316999 - DNA, 25 bp, Probe Sequence
ttcccaatagccaactgcgacacat

SEQ ID NO: 317000 - DNA, 25 bp, Probe Sequence
ttccaaaagtccgtcagaccacagt

SEQ ID NO: 317001 - DNA, 25 bp, Probe Sequence
ttcccgggatccatcaaccaagtgg

SEQ ID NO: 317002 - DNA, 25 bp, Probe Sequence
ttcccgggatctttttccaaatgat

SEQ ID NO: 317003 - DNA, 25 bp, Probe Sequence
ttcccgggatatttttcaatccact

SEQ ID NO: 317004 - DNA, 25 bp, Probe Sequence
ttcccgggatgcgacatttcatata

SEQ ID NO: 317005 - DNA, 25 bp, Probe Sequence
ttcccgggatctggtatcttcaaaa

SEQ ID NO: 317006 - DNA, 25 bp, Probe Sequence
ttcccgggattgcctatcatatagt

SEQ ID NO: 317007 - DNA, 25 bp, Probe Sequence
ttcccgggatgctttaaaagatgaa

SEQ ID NO: 317008 - DNA, 25 bp, Probe Sequence
ttcccgggatctttgcaaggagagc

SEQ ID NO: 317009 - DNA, 25 bp, Probe Sequence
ttcccagggctatatggcaagcaag

SEQ ID NO: 317010 - DNA, 25 bp, Probe Sequence
ttcccgtactgattagtcaacagtg

SEQ ID NO: 317011 - DNA, 25 bp, Probe Sequence
ttcccgctcctattagatctaatgc

SEQ ID NO: 317012 - DNA, 25 bp, Probe Sequence
ttcccgtcatcaaatgactgctgaa

SEQ ID NO: 317013 - DNA, 25 bp, Probe Sequence
ttgccccttatttaatgctgtaaag

SEQ ID NO: 317014 - DNA, 25 bp, Probe Sequence
ttcccttttgtcttcttgataatag

SEQ ID NO: 317015 - DNA, 25 bp, Probe Sequence
ttccccattcctttattgtacataa

SEQ ID NO: 317016 - DNA, 25 bp, Probe Sequence
ttcctcctgtcccgattatgtgaaa

SEQ ID NO: 317017 - DNA, 25 bp, Probe Sequence
ttccccatcctgcagattatgtgga

SEQ ID NO: 317018 - DNA, 25 bp, Probe Sequence
ttccccatgcctggttttgatgagc

SEQ ID NO: 317019 - DNA, 25 bp, Probe Sequence
ttcggacgccggattttgacgtgct

SEQ ID NO: 317020 - DNA, 25 bp, Probe Sequence
ttccacaccgggatgctttgtttgt

SEQ ID NO: 317021 - DNA, 25 bp, Probe Sequence
ttcccaccctgactagtcattttgt

SEQ ID NO: 317022 - DNA, 25 bp, Probe Sequence
ttcctcaggcctctcagtagtaagt

SEQ ID NO: 317023 - DNA, 25 bp, Probe Sequence
ttcctccctctcctaaagtaatttg

SEQ ID NO: 317024 - DNA, 25 bp, Probe Sequence
ttcccacagctcactatgacctgaa

SEQ ID NO: 317025 - DNA, 25 bp, Probe Sequence
ttcccagccttggcaatgccagctg

SEQ ID NO: 317026 - DNA, 25 bp, Probe Sequence
ttccaagctttggcattcaggcccc

SEQ ID NO: 317027 - DNA, 25 bp, Probe Sequence
ttccattgctcttggcttcatggtg

SEQ ID NO: 317028 - DNA, 25 bp, Probe Sequence
ttccagatcgcttgcttcattggtc

SEQ ID NO: 317029 - DNA, 25 bp, Probe Sequence
ttccagacctagcttgtgactgaaa

SEQ ID NO: 317030 - DNA, 25 bp, Probe Sequence
ttgccagtcactccgttttgcaaaa

SEQ ID NO: 317031 - DNA, 25 bp, Probe Sequence
ttccgccacagcctgtttatcaaaa

SEQ ID NO: 317032 - DNA, 25 bp, Probe Sequence
ttcccaaaccatacttgctaaaaat

SEQ ID NO: 317033 - DNA, 25 bp, Probe Sequence
ttgccctaaaagacctcttaataat

SEQ ID NO: 317034 - DNA, 25 bp, Probe Sequence
ttccctaagtccaactactaaactg

SEQ ID NO: 317035 - DNA, 25 bp, Probe Sequence
ttccctaagtccaactactaaactg

SEQ ID NO: 317036 - DNA, 25 bp, Probe Sequence
ttccctaagtccaactactaaactg

SEQ ID NO: 317037 - DNA, 25 bp, Probe Sequence
ttccactactgctaccacaactata

SEQ ID NO: 317038 - DNA, 25 bp, Probe Sequence
ttccctatttcagcacaatcttaga

SEQ ID NO: 317039 - DNA, 25 bp, Probe Sequence
ttcccatgttgttaactatttaggt

SEQ ID NO: 317040 - DNA, 25 bp, Probe Sequence
ttcctatctcgttcaaatttttggt

SEQ ID NO: 317041 - DNA, 25 bp, Probe Sequence
ttgcgtaccagttccacttaaatgg

SEQ ID NO: 317042 - DNA, 25 bp, Probe Sequence
ttcgagacctgtgacctggacaatg

SEQ ID NO: 317043 - DNA, 25 bp, Probe Sequence
ttcgaccacttggccgatgggaatg

SEQ ID NO: 317044 - DNA, 25 bp, Probe Sequence
ttccctactcattcctatgggaatg

SEQ ID NO: 317045 - DNA, 25 bp, Probe Sequence
ttccttagccttgctcaggtgcaag

SEQ ID NO: 317046 - DNA, 25 bp, Probe Sequence
ttccttcccttgggcaggaaagcca

SEQ ID NO: 317047 - DNA, 25 bp, Probe Sequence
ttccttttcttggtcatgtataagc

SEQ ID NO: 317048 - DNA, 25 bp, Probe Sequence
ttcctttctttcttcagctattagt

SEQ ID NO: 317049 - DNA, 25 bp, Probe Sequence
ttcctttgttgtatggctgagtaat

SEQ ID NO: 317050 - DNA, 25 bp, Probe Sequence
ttccatcttgttctggcctagaggt

SEQ ID NO: 317051 - DNA, 25 bp, Probe Sequence
ttcccattttagggcactaaattca

SEQ ID NO: 317052 - DNA, 25 bp, Probe Sequence
ttcctttttcaagtcattcaagtta

SEQ ID NO: 317053 - DNA, 25 bp, Probe Sequence
ttccttcttggtttcccatagtata

SEQ ID NO: 317054 - DNA, 25 bp, Probe Sequence
ttcctacctggacatgtcccattaa

SEQ ID NO: 317055 - DNA, 25 bp, Probe Sequence
ttccttcctgggcatggagtcctgt

SEQ ID NO: 317056 - DNA, 25 bp, Probe Sequence
ttccctcctggtccatgagtgttat

SEQ ID NO: 317057 - DNA, 25 bp, Probe Sequence
ttcccaaccctggcaggtgcttgtg

SEQ ID NO: 317058 - DNA, 25 bp, Probe Sequence
ttccgaggcacctgcatttgttgag

SEQ ID NO: 317059 - DNA, 25 bp, Probe Sequence
ttccagaggccctaggcgggatggg

SEQ ID NO: 317060 - DNA, 25 bp, Probe Sequence
ttccataccctctgtgtgggatgga

SEQ ID NO: 317061 - DNA, 25 bp, Probe Sequence
ttcctactgcctgggctggaggagg

SEQ ID NO: 317062 - DNA, 25 bp, Probe Sequence
ttcctactgcctgggctggaggagg

SEQ ID NO: 317063 - DNA, 25 bp, Probe Sequence
ttcctaccagaccggagaggggaga

SEQ ID NO: 317064 - DNA, 25 bp, Probe Sequence
ttccaagccaatacgaaggggaaga

SEQ ID NO: 317065 - DNA, 25 bp, Probe Sequence
ttccatcccttcctgaagggggaca

SEQ ID NO: 317066 - DNA, 25 bp, Probe Sequence
ttcctcacctttaaactggggatca

SEQ ID NO: 317067 - DNA, 25 bp, Probe Sequence
ttcctcaccctaaaactaagcgtgc

SEQ ID NO: 317068 - DNA, 25 bp, Probe Sequence
ttcctaccgaaaccctgcagaggga

SEQ ID NO: 317069 - DNA, 25 bp, Probe Sequence
ttcccgcggaatcggcgctgagaag

SEQ ID NO: 317070 - DNA, 25 bp, Probe Sequence
ttcctgcagtggctcgggtgagatg

SEQ ID NO: 317071 - DNA, 25 bp, Probe Sequence
ttcctgcactggttcacgggtgagg

SEQ ID NO: 317072 - DNA, 25 bp, Probe Sequence
ttcctcttggctcccaggaggaggg

SEQ ID NO: 317073 - DNA, 25 bp, Probe Sequence
ttcccttatgccctgactggagagg

SEQ ID NO: 317074 - DNA, 25 bp, Probe Sequence
ttgccacctcaggggcttggatatg

SEQ ID NO: 317075 - DNA, 25 bp, Probe Sequence
ttccccatatgtgttggagaatgac

SEQ ID NO: 317076 - DNA, 25 bp, Probe Sequence
ttcccacctgattttgtgacactat

SEQ ID NO: 317077 - DNA, 25 bp, Probe Sequence
ttccaatctggattcttggaaacag

SEQ ID NO: 317078 - DNA, 25 bp, Probe Sequence
ttgccaatggtgctttggatactcg

SEQ ID NO: 317079 - DNA, 25 bp, Probe Sequence
ttccagtggtgacttcactgatatt

SEQ ID NO: 317080 - DNA, 25 bp, Probe Sequence
ttccagtggtgacttcactgatatt

SEQ ID NO: 317081 - DNA, 25 bp, Probe Sequence
ttccacatttggctgcatcttgaat

SEQ ID NO: 317082 - DNA, 25 bp, Probe Sequence
ttcccatttgagagcagcgtgatgt

SEQ ID NO: 317083 - DNA, 25 bp, Probe Sequence
ttccctattgtgacagagccatggt

SEQ ID NO: 317084 - DNA, 25 bp, Probe Sequence
ttcctccaagctccagagccattgg

SEQ ID NO: 317085 - DNA, 25 bp, Probe Sequence
ttccaccaagtgtctagagtcatgt

SEQ ID NO: 317086 - DNA, 25 bp, Probe Sequence
ttccaacagatgctctggcaggaat

SEQ ID NO: 317087 - DNA, 25 bp, Probe Sequence
ttgtaacatattgtgaccaaatggg

SEQ ID NO: 317088 - DNA, 25 bp, Probe Sequence
ttgtaaatgattctgtgcccaggag

SEQ ID NO: 317089 - DNA, 25 bp, Probe Sequence
ttgtaacattggtttcccgagatgg

SEQ ID NO: 317090 - DNA, 25 bp, Probe Sequence
ttcgcaccattgcggtcgcgcggat

SEQ ID NO: 317091 - DNA, 25 bp, Probe Sequence
ttccacacactgagcagtactggga

SEQ ID NO: 317092 - DNA, 25 bp, Probe Sequence
ttcccgcaatgtttggacttcgatg

SEQ ID NO: 317093 - DNA, 25 bp, Probe Sequence
ttcccacaatcctctacttcagtgg

SEQ ID NO: 317094 - DNA, 25 bp, Probe Sequence
ttcccacagtctctcaactacgggg

SEQ ID NO: 317095 - DNA, 25 bp, Probe Sequence
ttcctacagcgtctccaatagcgag

SEQ ID NO: 317096 - DNA, 25 bp, Probe Sequence
ttcctgacctctcttctttggagag

SEQ ID NO: 317097 - DNA, 25 bp, Probe Sequence
ttcctcacccttttctagatgtaag

SEQ ID NO: 317098 - DNA, 25 bp, Probe Sequence
ttcctctccacttttcaatactgaa

SEQ ID NO: 317099 - DNA, 25 bp, Probe Sequence
ttccatcccatcatcttggtactac

SEQ ID NO: 317100 - DNA, 25 bp, Probe Sequence
ttccattccattttcatttattact

SEQ ID NO: 317101 - DNA, 25 bp, Probe Sequence
ttccgtcttatttcatttctgtaac

SEQ ID NO: 317102 - DNA, 25 bp, Probe Sequence
ttcctgtcatctattcgctactaaa

SEQ ID NO: 317103 - DNA, 25 bp, Probe Sequence
ttccttatctttccagtggctaaac

SEQ ID NO: 317104 - DNA, 25 bp, Probe Sequence
ttccctgatcttctgattgccataa

SEQ ID NO: 317105 - DNA, 25 bp, Probe Sequence
ttcctgttcactctgttaataagaa

SEQ ID NO: 317106 - DNA, 25 bp, Probe Sequence
ttcctcttctccctttgcaagagga

SEQ ID NO: 317107 - DNA, 25 bp, Probe Sequence
ttccctgctgtcgtcttagcaagaa

SEQ ID NO: 317108 - DNA, 25 bp, Probe Sequence
ttccttctgtgcctttgaatacaaa

SEQ ID NO: 317109 - DNA, 25 bp, Probe Sequence
ttcctctctaccatgtcaatgaaaa

SEQ ID NO: 317110 - DNA, 25 bp, Probe Sequence
ttccctttccctaaatcaaatcaat

SEQ ID NO: 317111 - DNA, 25 bp, Probe Sequence
ttccatttgtacctaagagaaaaat

SEQ ID NO: 317112 - DNA, 25 bp, Probe Sequence
ttcctgttgtacatttaggttattc

SEQ ID NO: 317113 - DNA, 25 bp, Probe Sequence
ttccttttcactgttatggcctttt

SEQ ID NO: 317114 - DNA, 25 bp, Probe Sequence
ttcctttacacctgaatgtgccatt

SEQ ID NO: 317115 - DNA, 25 bp, Probe Sequence
ttcccttacacatagcagagctcac

SEQ ID NO: 317116 - DNA, 25 bp, Probe Sequence
ttcctattaaagtacagatctaatc

SEQ ID NO: 317117 - DNA, 25 bp, Probe Sequence
ttcctataccagtgccagtctatac

SEQ ID NO: 317118 - DNA, 25 bp, Probe Sequence
ttcctattggagtgcaatccttact

SEQ ID NO: 317119 - DNA, 25 bp, Probe Sequence
ttgcctagttgacaacattgcttga

SEQ ID NO: 317120 - DNA, 25 bp, Probe Sequence
ttcctaatctcactcaaatctgcag

SEQ ID NO: 317121 - DNA, 25 bp, Probe Sequence
ttccatggcaccgtcaaggctgaga

SEQ ID NO: 317122 - DNA, 25 bp, Probe Sequence
ttccatggcaccgtcaaggctgaga

SEQ ID NO: 317123 - DNA, 25 bp, Probe Sequence
ttcctgcgcaccttataccagaatt

SEQ ID NO: 317124 - DNA, 25 bp, Probe Sequence
ttcccacaccactaacacagagagt

SEQ ID NO: 317125 - DNA, 25 bp, Probe Sequence
ttccctcaagcctaccaaagagcta

SEQ ID NO: 317126 - DNA, 25 bp, Probe Sequence
ttccctttctgttccaaagcagtct

SEQ ID NO: 317127 - DNA, 25 bp, Probe Sequence
ttgtccaatgttttccataaggctt

SEQ ID NO: 317128 - DNA, 25 bp, Probe Sequence
ttgcatctccaaaattacaacggtt

SEQ ID NO: 317129 - DNA, 25 bp, Probe Sequence
ttgctccctacgatgagaactggtt

SEQ ID NO: 317130 - DNA, 25 bp, Probe Sequence
ttgaacctacgaggcgggggttgca

SEQ ID NO: 317131 - DNA, 25 bp, Probe Sequence
ttggacacaaccatgcggggtggcc

SEQ ID NO: 317132 - DNA, 25 bp, Probe Sequence
ttggacacaaccatgcggggtggcc

SEQ ID NO: 317133 - DNA, 25 bp, Probe Sequence
ttggacacaaccatgcggggtggcc

SEQ ID NO: 317134 - DNA, 25 bp, Probe Sequence
ttccaccacaccaggcgaagatgtt

SEQ ID NO: 317135 - DNA, 25 bp, Probe Sequence
ttgccacagccccaggagaggaatt

SEQ ID NO: 317136 - DNA, 25 bp, Probe Sequence
ttggtgacccagagcaagttattct

SEQ ID NO: 317137 - DNA, 25 bp, Probe Sequence
ttggtcccacagagcaggggatgta

SEQ ID NO: 317138 - DNA, 25 bp, Probe Sequence
ttgtggccaccgggcatgggaagta

SEQ ID NO: 317139 - DNA, 25 bp, Probe Sequence
ttgggccacgctcttgaggaagccc

SEQ ID NO: 317140 - DNA, 25 bp, Probe Sequence
ttgagtgccggctttctgagtagag

SEQ ID NO: 317141 - DNA, 25 bp, Probe Sequence
ttgagtgccggctttctgagtagag

SEQ ID NO: 317142 - DNA, 25 bp, Probe Sequence
ttcgagctccagctaggatgatcga

SEQ ID NO: 317143 - DNA, 25 bp, Probe Sequence
ttcgagcacctatagtgatgaagac

SEQ ID NO: 317144 - DNA, 25 bp, Probe Sequence
ttccaacctggaagttcaatgagtt

SEQ ID NO: 317145 - DNA, 25 bp, Probe Sequence
ttccaggggaattgttgcaatggag

SEQ ID NO: 317146 - DNA, 25 bp, Probe Sequence
ttccggcgcataaagtcagcaaggt

SEQ ID NO: 317147 - DNA, 25 bp, Probe Sequence
ttccgctcataataacagtaggcat

SEQ ID NO: 317148 - DNA, 25 bp, Probe Sequence
ttccccattgctcaacatataacat

SEQ ID NO: 317149 - DNA, 25 bp, Probe Sequence
ttccctcctctaaatgctataaata

SEQ ID NO: 317150 - DNA, 25 bp, Probe Sequence
ttcctctcccaaacatctaatatga

SEQ ID NO: 317151 - DNA, 25 bp, Probe Sequence
ttcctccccattcaatgcatatgtg

SEQ ID NO: 317152 - DNA, 25 bp, Probe Sequence
ttcctccctatgttcatactataga

SEQ ID NO: 317153 - DNA, 25 bp, Probe Sequence
ttccaacgtgatattccttgaagta

SEQ ID NO: 317154 - DNA, 25 bp, Probe Sequence
ttccaaggagcaggggcctcgacaa

SEQ ID NO: 317155 - DNA, 25 bp, Probe Sequence
ttccaagtggggatcctcatgacca

SEQ ID NO: 317156 - DNA, 25 bp, Probe Sequence
ttcctggggtggatgctctcagcaa

SEQ ID NO: 317157 - DNA, 25 bp, Probe Sequence
ttccgggagtggatcttccaggcca

SEQ ID NO: 317158 - DNA, 25 bp, Probe Sequence
ttccggctggtagtagttccgcttc

SEQ ID NO: 317159 - DNA, 25 bp, Probe Sequence
ttcgaggtggtgggactcaccgctc

SEQ ID NO: 317160 - DNA, 25 bp, Probe Sequence
ttcgacattgagcggcgtgaccggc

SEQ ID NO: 317161 - DNA, 25 bp, Probe Sequence
ttcgaaacatagtggaggccgcagc

SEQ ID NO: 317162 - DNA, 25 bp, Probe Sequence
ttcgaaggctctggggaggcccgag

SEQ ID NO: 317163 - DNA, 25 bp, Probe Sequence
ttccacgagctcgtggtgggctctc

SEQ ID NO: 317164 - DNA, 25 bp, Probe Sequence
ttccacgagacgcttgactgctgtg

SEQ ID NO: 317165 - DNA, 25 bp, Probe Sequence
ttcccagagtcggcttatgtcgctg

SEQ ID NO: 317166 - DNA, 25 bp, Probe Sequence
ttcccatgatcatgctcttatctcc

SEQ ID NO: 317167 - DNA, 25 bp, Probe Sequence
ttccaaatatgactttacccttgac

SEQ ID NO: 317168 - DNA, 25 bp, Probe Sequence
ttccattttgacctgtaccttgaac

SEQ ID NO: 317169 - DNA, 25 bp, Probe Sequence
ttccattcttgaggattatgcaaat

SEQ ID NO: 317170 - DNA, 25 bp, Probe Sequence
ttccttgctcgagtttcataccaga

SEQ ID NO: 317171 - DNA, 25 bp, Probe Sequence
ttccttgctcgagtttcataccaga

SEQ ID NO: 317172 - DNA, 25 bp, Probe Sequence
ttgcctctgggaattttgtcaagat

SEQ ID NO: 317173 - DNA, 25 bp, Probe Sequence
ttcctgtggcaaattctaccaagca

SEQ ID NO: 317174 - DNA, 25 bp, Probe Sequence
ttccatggacatgttccacacgcgc

SEQ ID NO: 317175 - DNA, 25 bp, Probe Sequence
ttcctgcagaatgtgctcaacaacc

SEQ ID NO: 317176 - DNA, 25 bp, Probe Sequence
ttccgccagatgtgctgcaaaacct

SEQ ID NO: 317177 - DNA, 25 bp, Probe Sequence
ttccccagcataggcgcagacagtt

SEQ ID NO: 317178 - DNA, 25 bp, Probe Sequence
ttgcactgcctgaaatgggagcagt

SEQ ID NO: 317179 - DNA, 25 bp, Probe Sequence
ttgactgtggaagatgatggttgca

SEQ ID NO: 317180 - DNA, 25 bp, Probe Sequence
ttgccgctggcatgcctgaggaatg

SEQ ID NO: 317181 - DNA, 25 bp, Probe Sequence
ttgcctttcactgatgggaaccaac

SEQ ID NO: 317182 - DNA, 25 bp, Probe Sequence
ttgcctttcaaactggaaaccccag

SEQ ID NO: 317183 - DNA, 25 bp, Probe Sequence
ttccttggcaaagtgaaccgcccct

SEQ ID NO: 317184 - DNA, 25 bp, Probe Sequence
ttccagcttaaagaacttgcccacc

SEQ ID NO: 317185 - DNA, 25 bp, Probe Sequence
ttgggtagagttgagcagccgcccc

SEQ ID NO: 317186 - DNA, 25 bp, Probe Sequence
ttgttttggtgatacctcacccctg

SEQ ID NO: 317187 - DNA, 25 bp, Probe Sequence
ttgtattttctgtccaagtacccta

SEQ ID NO: 317188 - DNA, 25 bp, Probe Sequence
ttggaatcggtttgcatttacgcct

SEQ ID NO: 317189 - DNA, 25 bp, Probe Sequence
ttgatatctcggatacaatagaggc

SEQ ID NO: 317190 - DNA, 25 bp, Probe Sequence
ttgaatccgggtggcagaggctaca

SEQ ID NO: 317191 - DNA, 25 bp, Probe Sequence
ttgcacatgccgtcggccatgactg

SEQ ID NO: 317192 - DNA, 25 bp, Probe Sequence
ttgccccagatccagaagatcatga

SEQ ID NO: 317193 - DNA, 25 bp, Probe Sequence
ttccaccatggccaacaacgaagga

SEQ ID NO: 317194 - DNA, 25 bp, Probe Sequence
ttgccactgatgaccggaaagaagg

SEQ ID NO: 317195 - DNA, 25 bp, Probe Sequence
ttgcccgttgaccagataaatagaa

SEQ ID NO: 317196 - DNA, 25 bp, Probe Sequence
ttccctttgctccagaaacacagat

SEQ ID NO: 317197 - DNA, 25 bp, Probe Sequence
ttccctttgctccagaaacacagat

SEQ ID NO: 317198 - DNA, 25 bp, Probe Sequence
ttcccacttgagcaggtacacaact

SEQ ID NO: 317199 - DNA, 25 bp, Probe Sequence
ttcctcctatatcctcagtaacaac

SEQ ID NO: 317200 - DNA, 25 bp, Probe Sequence
ttccaaccattggtcaccagaaatc

SEQ ID NO: 317201 - DNA, 25 bp, Probe Sequence
ttgcagagcacatttgcctactaat

SEQ ID NO: 317202 - DNA, 25 bp, Probe Sequence
ttccaacagttgctgactcacatta

SEQ ID NO: 317203 - DNA, 25 bp, Probe Sequence
ttccaactgtacatacatactgtat

SEQ ID NO: 317204 - DNA, 25 bp, Probe Sequence
ttccccttgagaaacttctgcattt

SEQ ID NO: 317205 - DNA, 25 bp, Probe Sequence
ttccccttgagaaacttctgcattt

SEQ ID NO: 317206 - DNA, 25 bp, Probe Sequence
ttccctaatatgtatactatctttt

SEQ ID NO: 317207 - DNA, 25 bp, Probe Sequence
ttcctcatctgaatgaaacatattt

SEQ ID NO: 317208 - DNA, 25 bp, Probe Sequence
ttcccattaggctcatcatactgtg

SEQ ID NO: 317209 - DNA, 25 bp, Probe Sequence
ttcccttcagaaccacatgtgtgtg

SEQ ID NO: 317210 - DNA, 25 bp, Probe Sequence
ttccctctcccacatatgagtggaa

SEQ ID NO: 317211 - DNA, 25 bp, Probe Sequence
ttcccatcactcgaactggcagtgg

SEQ ID NO: 317212 - DNA, 25 bp, Probe Sequence
ttccaatatcctcacggactggacg

SEQ ID NO: 317213 - DNA, 25 bp, Probe Sequence
ttccttgatactcacgaagcggaca

SEQ ID NO: 317214 - DNA, 25 bp, Probe Sequence
ttccatttaccttctgggccagata

SEQ ID NO: 317215 - DNA, 25 bp, Probe Sequence
ttcctttcctctatgtggtggctac

SEQ ID NO: 317216 - DNA, 25 bp, Probe Sequence
ttcctttgtcttaatcgatctggta

SEQ ID NO: 317217 - DNA, 25 bp, Probe Sequence
ttcctagtccttttaatgctgtgtg

SEQ ID NO: 317218 - DNA, 25 bp, Probe Sequence
ttcctagtccctgtcacacagtagg

SEQ ID NO: 317219 - DNA, 25 bp, Probe Sequence
ttccaaggacttctccacagctaag

SEQ ID NO: 317220 - DNA, 25 bp, Probe Sequence
ttccacagccacattaccatagcaa

SEQ ID NO: 317221 - DNA, 25 bp, Probe Sequence
ttccacagccacattaccatagcaa

SEQ ID NO: 317222 - DNA, 25 bp, Probe Sequence
ttccaagcacagaataattccacaa

SEQ ID NO: 317223 - DNA, 25 bp, Probe Sequence
ttccacctcggaacatcacatctaa

SEQ ID NO: 317224 - DNA, 25 bp, Probe Sequence
ttcccacatcttcccaagctgtgaa

SEQ ID NO: 317225 - DNA, 25 bp, Probe Sequence
ttccgcctttcgcaagatgatgtga

SEQ ID NO: 317226 - DNA, 25 bp, Probe Sequence
ttccctcattgtagcgaagagcagg

SEQ ID NO: 317227 - DNA, 25 bp, Probe Sequence
ttcccatatatttcacactggagtg

SEQ ID NO: 317228 - DNA, 25 bp, Probe Sequence
ttccaattttatggcctggagtgaa

SEQ ID NO: 317229 - DNA, 25 bp, Probe Sequence
ttccatccgttagcgcgaggtagca

SEQ ID NO: 317230 - DNA, 25 bp, Probe Sequence
ttccacctcttcaccgtggatagtc

SEQ ID NO: 317231 - DNA, 25 bp, Probe Sequence
ttccaacagtttgccagtggttcct

SEQ ID NO: 317232 - DNA, 25 bp, Probe Sequence
ttcccacgtttcccgggatatatat

SEQ ID NO: 317233 - DNA, 25 bp, Probe Sequence
ttcccccttatcttcgggagataca

SEQ ID NO: 317234 - DNA, 25 bp, Probe Sequence
ttcccccttattgatgggactgata

SEQ ID NO: 317235 - DNA, 25 bp, Probe Sequence
ttccagcccattttaattagactat

SEQ ID NO: 317236 - DNA, 25 bp, Probe Sequence
ttcccaccttcgaagattaccagat

SEQ ID NO: 317237 - DNA, 25 bp, Probe Sequence
ttgtctaatttcaataactaccagt

SEQ ID NO: 317238 - DNA, 25 bp, Probe Sequence
ttgtcgttttaacatctccacgtcc

SEQ ID NO: 317239 - DNA, 25 bp, Probe Sequence
ttgccctttataagaaacccagtga

SEQ ID NO: 317240 - DNA, 25 bp, Probe Sequence
ttgccaatatgatctgaaaacccag

SEQ ID NO: 317241 - DNA, 25 bp, Probe Sequence
ttgcccattgaaatgccaggtccca

SEQ ID NO: 317242 - DNA, 25 bp, Probe Sequence
ttgcgcctaatcatgtcgtcgccaa

SEQ ID NO: 317243 - DNA, 25 bp, Probe Sequence
ttgcctcaacacatgtgagggccaa

SEQ ID NO: 317244 - DNA, 25 bp, Probe Sequence
ttgccaaaacttggaggcgaccaaa

SEQ ID NO: 317245 - DNA, 25 bp, Probe Sequence
ttccaagacgctggggcagcagagc

SEQ ID NO: 317246 - DNA, 25 bp, Probe Sequence
ttgaaaacgctgcggcaagccgtca

SEQ ID NO: 317247 - DNA, 25 bp, Probe Sequence
ttgtgggactggtggaagcaggaca

SEQ ID NO: 317248 - DNA, 25 bp, Probe Sequence
ttgcgggacggcaggacatcctgga

SEQ ID NO: 317249 - DNA, 25 bp, Probe Sequence
ttgcgtggacagtcagggttcactt

SEQ ID NO: 317250 - DNA, 25 bp, Probe Sequence
ttgcgatggacacaaagcccacacc

SEQ ID NO: 317251 - DNA, 25 bp, Probe Sequence
ttgctgatgaaacactgacctcttg

SEQ ID NO: 317252 - DNA, 25 bp, Probe Sequence
ttgctgttaacaaatgactagcttt

SEQ ID NO: 317253 - DNA, 25 bp, Probe Sequence
ttccttcaactggctactgagtcat

SEQ ID NO: 317254 - DNA, 25 bp, Probe Sequence
ttccttcacctcgtcgtatatatcc

SEQ ID NO: 317255 - DNA, 25 bp, Probe Sequence
ttccttcaccacatggctttatcca

SEQ ID NO: 317256 - DNA, 25 bp, Probe Sequence
ttccatatccccaggattgcaaccc

SEQ ID NO: 317257 - DNA, 25 bp, Probe Sequence
ttccattggacctgccaatcacacc

SEQ ID NO: 317258 - DNA, 25 bp, Probe Sequence
ttcctttgttcatccatttcacagc

SEQ ID NO: 317259 - DNA, 25 bp, Probe Sequence
ttcctttgttcatccatttcacagc

SEQ ID NO: 317260 - DNA, 25 bp, Probe Sequence
ttcctggtgttcacatctgtcccag

SEQ ID NO: 317261 - DNA, 25 bp, Probe Sequence
ttccaatgtcttaaatcagtcacca

SEQ ID NO: 317262 - DNA, 25 bp, Probe Sequence
ttggcttgtcatttcagtggtcttc

SEQ ID NO: 317263 - DNA, 25 bp, Probe Sequence
ttgtcgtgtctgttcaaaccggcac

SEQ ID NO: 317264 - DNA, 25 bp, Probe Sequence
ttccagatgtcgtaacaactccgcc

SEQ ID NO: 317265 - DNA, 25 bp, Probe Sequence
ttccagtgcctgaaagctttcctgc

SEQ ID NO: 317266 - DNA, 25 bp, Probe Sequence
ttcccatctggaatcagttgcccat

SEQ ID NO: 317267 - DNA, 25 bp, Probe Sequence
ttcccatgctgcaatttcttcctga

SEQ ID NO: 317268 - DNA, 25 bp, Probe Sequence
ttccacacatcttcttggtcttgca

SEQ ID NO: 317269 - DNA, 25 bp, Probe Sequence
ttcctgcaagcttctggttctttat

SEQ ID NO: 317270 - DNA, 25 bp, Probe Sequence
ttcctgcgagttgctttcagtcatt

SEQ ID NO: 317271 - DNA, 25 bp, Probe Sequence
ttccccagttcagtgttgcatgtat

SEQ ID NO: 317272 - DNA, 25 bp, Probe Sequence
ttgccccagtacatgacctgtatgg

SEQ ID NO: 317273 - DNA, 25 bp, Probe Sequence
ttgctacgcaattctcgattctttg

SEQ ID NO: 317274 - DNA, 25 bp, Probe Sequence
ttgctatggctatcttgtcttttcc

SEQ ID NO: 317275 - DNA, 25 bp, Probe Sequence
ttgctgatctgttaaaatttctttc

SEQ ID NO: 317276 - DNA, 25 bp, Probe Sequence
ttgctggtggaagacactatttacc

SEQ ID NO: 317277 - DNA, 25 bp, Probe Sequence
ttgcggcggaatcacaggctgatta

SEQ ID NO: 317278 - DNA, 25 bp, Probe Sequence
ttgcggagcggggaaggtgactacc

SEQ ID NO: 317279 - DNA, 25 bp, Probe Sequence
ttgttggcaagggtaagctgactaa

SEQ ID NO: 317280 - DNA, 25 bp, Probe Sequence
ttgctcttgcaatgggaatgatgga

SEQ ID NO: 317281 - DNA, 25 bp, Probe Sequence
ttccattgcagagtcttaagaaaga

SEQ ID NO: 317282 - DNA, 25 bp, Probe Sequence
ttcctgctgcagaagttaggtaaca

SEQ ID NO: 317283 - DNA, 25 bp, Probe Sequence
ttccagctcacttgcttcaggatca

SEQ ID NO: 317284 - DNA, 25 bp, Probe Sequence
ttccctcacatgccatccagtgaga

SEQ ID NO: 317285 - DNA, 25 bp, Probe Sequence
ttccctacctgcatcatgtgcatgt

SEQ ID NO: 317286 - DNA, 25 bp, Probe Sequence
ttccctgacctcttgggcatttgta

SEQ ID NO: 317287 - DNA, 25 bp, Probe Sequence
ttcccttactcttggatgcttctta

SEQ ID NO: 317288 - DNA, 25 bp, Probe Sequence
ttcccttactcttggatgcttctta

SEQ ID NO: 317289 - DNA, 25 bp, Probe Sequence
ttccaaaactaaggatgcatatgtt

SEQ ID NO: 317290 - DNA, 25 bp, Probe Sequence
ttgaaatcccgaggtgtcatttgac

SEQ ID NO: 317291 - DNA, 25 bp, Probe Sequence
ttgaacaaccggatgtctctctgca

SEQ ID NO: 317292 - DNA, 25 bp, Probe Sequence
ttgaacaaactgtgaatcttctgga

SEQ ID NO: 317293 - DNA, 25 bp, Probe Sequence
ttgaaaggactgtcgtttcctccct

SEQ ID NO: 317294 - DNA, 25 bp, Probe Sequence
ttgaaataggcttccttaacctcct

SEQ ID NO: 317295 - DNA, 25 bp, Probe Sequence
ttccaatagttagatctaccctgcc

SEQ ID NO: 317296 - DNA, 25 bp, Probe Sequence
ttccaaaatgtcgtacaactccgcc

SEQ ID NO: 317297 - DNA, 25 bp, Probe Sequence
ttccaataatgtcttgcatttgtac

SEQ ID NO: 317298 - DNA, 25 bp, Probe Sequence
ttccactcgtggttgtgattttcac

SEQ ID NO: 317299 - DNA, 25 bp, Probe Sequence
ttccctcctgtgtcaagtagctaac

SEQ ID NO: 317300 - DNA, 25 bp, Probe Sequence
ttgccccctgggtaatagtgaagag

SEQ ID NO: 317301 - DNA, 25 bp, Probe Sequence
ttcccctcgggaacatgaggtggtg

SEQ ID NO: 317302 - DNA, 25 bp, Probe Sequence
ttccccctggaatcgaggctgtgtg

SEQ ID NO: 317303 - DNA, 25 bp, Probe Sequence
ttgccccatgggaagacgaggccct

SEQ ID NO: 317304 - DNA, 25 bp, Probe Sequence
ttgccctggtggagaaggccctgca

SEQ ID NO: 317305 - DNA, 25 bp, Probe Sequence
ttgccctggggcttgaatgagtccc

SEQ ID NO: 317306 - DNA, 25 bp, Probe Sequence
ttgcccgatgatcaaatgaagtcca

SEQ ID NO: 317307 - DNA, 25 bp, Probe Sequence
ttccacagttaaggcatgaggctcc

SEQ ID NO: 317308 - DNA, 25 bp, Probe Sequence
ttccacattgctacccaatggacac

SEQ ID NO: 317309 - DNA, 25 bp, Probe Sequence
ttccatttcttccacgatggtgcag

SEQ ID NO: 317310 - DNA, 25 bp, Probe Sequence
ttccagtttgtctcgctgtgtaggc

SEQ ID NO: 317311 - DNA, 25 bp, Probe Sequence
ttccagtaatggtatcactgttgac

SEQ ID NO: 317312 - DNA, 25 bp, Probe Sequence
ttgtcagggaggtgccagttacagc

SEQ ID NO: 317313 - DNA, 25 bp, Probe Sequence
ttgttgggagcacagccagaacacc

SEQ ID NO: 317314 - DNA, 25 bp, Probe Sequence
ttgttggagcactgaccagaacact

SEQ ID NO: 317315 - DNA, 25 bp, Probe Sequence
ttgaggtcatcctgacacggatccg

SEQ ID NO: 317316 - DNA, 25 bp, Probe Sequence
ttggggatccaaaatatgtgacctt

SEQ ID NO: 317317 - DNA, 25 bp, Probe Sequence
ttccgtcatccaaaatataacactt

SEQ ID NO: 317318 - DNA, 25 bp, Probe Sequence
ttccgtctccaataattaatcattc

SEQ ID NO: 317319 - DNA, 25 bp, Probe Sequence
ttccagttacaatttactagtattc

SEQ ID NO: 317320 - DNA, 25 bp, Probe Sequence
ttgaagttggaatctcgctccttcc

SEQ ID NO: 317321 - DNA, 25 bp, Probe Sequence
ttgcaaagtgaatgtgtccccttcc

SEQ ID NO: 317322 - DNA, 25 bp, Probe Sequence
ttgacttgggcatcgtgtccttgta

SEQ ID NO: 317323 - DNA, 25 bp, Probe Sequence
ttgacctcctgatcaggaactttag

SEQ ID NO: 317324 - DNA, 25 bp, Probe Sequence
ttgttgaccataaccgtacatcttt

SEQ ID NO: 317325 - DNA, 25 bp, Probe Sequence
ttgcttcgcacaaggctctttagtt

SEQ ID NO: 317326 - DNA, 25 bp, Probe Sequence
ttgctccttgcatggctcattaggt

SEQ ID NO: 317327 - DNA, 25 bp, Probe Sequence
ttgctgccttcaccacatattagtg

SEQ ID NO: 317328 - DNA, 25 bp, Probe Sequence
ttgcgctcaccatcaataaaagtaa

SEQ ID NO: 317329 - DNA, 25 bp, Probe Sequence
ttgctccaagcttcctgtaaactat

SEQ ID NO: 317330 - DNA, 25 bp, Probe Sequence
ttgcttgggtccctgtgaaccatga

SEQ ID NO: 317331 - DNA, 25 bp, Probe Sequence
ttgttcagtggccggctctgaaaga

SEQ ID NO: 317332 - DNA, 25 bp, Probe Sequence
ttgttagggcagctcttggaaacta

SEQ ID NO: 317333 - DNA, 25 bp, Probe Sequence
ttccataaggcatttcttgaggtaa

SEQ ID NO: 317334 - DNA, 25 bp, Probe Sequence
ttccgcacatggagccaatatgcga

SEQ ID NO: 317335 - DNA, 25 bp, Probe Sequence
ttgcgtgcctgtatcaagtgtctca

SEQ ID NO: 317336 - DNA, 25 bp, Probe Sequence
ttgcggccatgtctgtcatgcggcc

SEQ ID NO: 317337 - DNA, 25 bp, Probe Sequence
ttgcaatgcaagaagggctgggccc

SEQ ID NO: 317338 - DNA, 25 bp, Probe Sequence
ttgcacatgactaagacggacccct

SEQ ID NO: 317339 - DNA, 25 bp, Probe Sequence
ttgaaacctaacgaatcctcctact

SEQ ID NO: 317340 - DNA, 25 bp, Probe Sequence
ttgtaaacttacggacacctctttg

SEQ ID NO: 317341 - DNA, 25 bp, Probe Sequence
ttgtaaacttacggacacctctttg

SEQ ID NO: 317342 - DNA, 25 bp, Probe Sequence
ttgataaaggaaagggcaccatctt

SEQ ID NO: 317343 - DNA, 25 bp, Probe Sequence
ttgtcatcaaggatactgtccctta

SEQ ID NO: 317344 - DNA, 25 bp, Probe Sequence
ttgcttcttgttcacttggtcttaa

SEQ ID NO: 317345 - DNA, 25 bp, Probe Sequence
ttgtaagggctctctgtggtttgac

SEQ ID NO: 317346 - DNA, 25 bp, Probe Sequence
ttgttcaggaattttgctgtttttc

SEQ ID NO: 317347 - DNA, 25 bp, Probe Sequence
ttgttcctgttgtttttaactagct

SEQ ID NO: 317348 - DNA, 25 bp, Probe Sequence
ttgttcccttatgtattcaagctta

SEQ ID NO: 317349 - DNA, 25 bp, Probe Sequence
ttgtaagcagctgtttaaaacatta

SEQ ID NO: 317350 - DNA, 25 bp, Probe Sequence
ttggaacgtgttttggctgaaagga

SEQ ID NO: 317351 - DNA, 25 bp, Probe Sequence
ttgaggacctggaataggcgccaag

SEQ ID NO: 317352 - DNA, 25 bp, Probe Sequence
ttgccatgacacagtaagaaccagg

SEQ ID NO: 317353 - DNA, 25 bp, Probe Sequence
ttgccaaaaattcatgccccagtat

SEQ ID NO: 317354 - DNA, 25 bp, Probe Sequence
ttccaatctataattatccccattt

SEQ ID NO: 317355 - DNA, 25 bp, Probe Sequence
ttccaatttctttacctggtctgta

SEQ ID NO: 317356 - DNA, 25 bp, Probe Sequence
ttgtaccttttagcctggctggtac

SEQ ID NO: 317357 - DNA, 25 bp, Probe Sequence
ttgtacgcagttttctttggcttta

SEQ ID NO: 317358 - DNA, 25 bp, Probe Sequence
ttgttcagagttgtttgggggttct

SEQ ID NO: 317359 - DNA, 25 bp, Probe Sequence
ttgtttcttttatgtggtggtttct

SEQ ID NO: 317360 - DNA, 25 bp, Probe Sequence
ttgttcttgtttgcagggctttttc

SEQ ID NO: 317361 - DNA, 25 bp, Probe Sequence
ttgtcttgaggcttccaggttttgt

SEQ ID NO: 317362 - DNA, 25 bp, Probe Sequence
ttgtttggtcagcacagcgtttcaa

SEQ ID NO: 317363 - DNA, 25 bp, Probe Sequence
ttgatggtgttccaagggtccctga

SEQ ID NO: 317364 - DNA, 25 bp, Probe Sequence
ttgatcgcgtttttggcagtacatc

SEQ ID NO: 317365 - DNA, 25 bp, Probe Sequence
ttgtcgacttgttttcagggctgga

SEQ ID NO: 317366 - DNA, 25 bp, Probe Sequence
ttgccaactttgttaagtggctcag

SEQ ID NO: 317367 - DNA, 25 bp, Probe Sequence
ttgctctagcatactttaaaggcca

SEQ ID NO: 317368 - DNA, 25 bp, Probe Sequence
ttgcattcatgcttctgtgtacaca

SEQ ID NO: 317369 - DNA, 25 bp, Probe Sequence
ttgcattcatgcttctgtgtacaca

SEQ ID NO: 317370 - DNA, 25 bp, Probe Sequence
ttgcattcatgcttctgtgtacaca

SEQ ID NO: 317371 - DNA, 25 bp, Probe Sequence
ttgcacataatcatgctattcagca

SEQ ID NO: 317372 - DNA, 25 bp, Probe Sequence
ttgcagcatccagttcatcttaaga

SEQ ID NO: 317373 - DNA, 25 bp, Probe Sequence
ttgcgcgtagttgctaacagcaaag

SEQ ID NO: 317374 - DNA, 25 bp, Probe Sequence
ttgccagtttctgcccagcaaaagc

SEQ ID NO: 317375 - DNA, 25 bp, Probe Sequence
ttccagtttccaaagcgagaggagc

SEQ ID NO: 317376 - DNA, 25 bp, Probe Sequence
ttcctggtccacaacgtcaaggagc

SEQ ID NO: 317377 - DNA, 25 bp, Probe Sequence
ttgcactggtacacgggcgagggca

SEQ ID NO: 317378 - DNA, 25 bp, Probe Sequence
ttgcacaagtttcctgggctggacc

SEQ ID NO: 317379 - DNA, 25 bp, Probe Sequence
ttccactgattattcttggctgaac

SEQ ID NO: 317380 - DNA, 25 bp, Probe Sequence
ttccctctgcaactggatgagctga

SEQ ID NO: 317381 - DNA, 25 bp, Probe Sequence
ttcctgctccatagacgtgaggctg

SEQ ID NO: 317382 - DNA, 25 bp, Probe Sequence
ttccgtctctggtgtagctgatgat

SEQ ID NO: 317383 - DNA, 25 bp, Probe Sequence
ttccctcttctgtgatagctgtagt

SEQ ID NO: 317384 - DNA, 25 bp, Probe Sequence
ttcccgcttctgcgttttgttattc

SEQ ID NO: 317385 - DNA, 25 bp, Probe Sequence
ttgttctgttttgttttgttttgct

SEQ ID NO: 317386 - DNA, 25 bp, Probe Sequence
ttgtcctttactgtagtcttttatg

SEQ ID NO: 317387 - DNA, 25 bp, Probe Sequence
ttgcccttgtccatgtagtttgttt

SEQ ID NO: 317388 - DNA, 25 bp, Probe Sequence
ttccttttccctgtgtattctagtg

SEQ ID NO: 317389 - DNA, 25 bp, Probe Sequence
ttccttttactttttgatactgtgt

SEQ ID NO: 317390 - DNA, 25 bp, Probe Sequence
ttccttcatgtctttatttagttgt

SEQ ID NO: 317391 - DNA, 25 bp, Probe Sequence
ttccttgcttgcttgttggttgtgt

SEQ ID NO: 317392 - DNA, 25 bp, Probe Sequence
ttccttgcttgcttgttggttgtgt

SEQ ID NO: 317393 - DNA, 25 bp, Probe Sequence
ttccttgcttgcttgttggttgtgt

SEQ ID NO: 317394 - DNA, 25 bp, Probe Sequence
ttccaggcttctttgggttgatccc

SEQ ID NO: 317395 - DNA, 25 bp, Probe Sequence
ttccgtctccatttggattatcaac

SEQ ID NO: 317396 - DNA, 25 bp, Probe Sequence
ttccagtccacctgttttcagagga

SEQ ID NO: 317397 - DNA, 25 bp, Probe Sequence
ttccgtctcccatgttatatgctgg

SEQ ID NO: 317398 - DNA, 25 bp, Probe Sequence
ttccgttcctacttgctagtgattt

SEQ ID NO: 317399 - DNA, 25 bp, Probe Sequence
ttccagcctcctgcagtcaaggagt

SEQ ID NO: 317400 - DNA, 25 bp, Probe Sequence
ttccagtcttctgactcgaggaatt

SEQ ID NO: 317401 - DNA, 25 bp, Probe Sequence
ttccgttcatctgttgagggacatt

SEQ ID NO: 317402 - DNA, 25 bp, Probe Sequence
ttcctgttctttataaggcacactc

SEQ ID NO: 317403 - DNA, 25 bp, Probe Sequence
ttcctcttcttgatagatgaggcca

SEQ ID NO: 317404 - DNA, 25 bp, Probe Sequence
ttcctgcgttactttgctgaggata

SEQ ID NO: 317405 - DNA, 25 bp, Probe Sequence
ttccgtgttacagcagctgcctgat

SEQ ID NO: 317406 - DNA, 25 bp, Probe Sequence
ttgccagtttagggcagtagctgct

SEQ ID NO: 317407 - DNA, 25 bp, Probe Sequence
ttgccaatttggcggtggctgccac

SEQ ID NO: 317408 - DNA, 25 bp, Probe Sequence
ttgcctttctggctgaggttctgag

SEQ ID NO: 317409 - DNA, 25 bp, Probe Sequence
ttgcctttctggctgaggttctgag

SEQ ID NO: 317410 - DNA, 25 bp, Probe Sequence
ttcctttctctgttcagctgttgat

SEQ ID NO: 317411 - DNA, 25 bp, Probe Sequence
ttcctttcctgatcactatgcattt

SEQ ID NO: 317412 - DNA, 25 bp, Probe Sequence
ttcctttttaacctgagattatatt

SEQ ID NO: 317413 - DNA, 25 bp, Probe Sequence
ttcctgctttctcagttacatgttt

SEQ ID NO: 317414 - DNA, 25 bp, Probe Sequence
ttcctcatgaaccctgttttgtttt

SEQ ID NO: 317415 - DNA, 25 bp, Probe Sequence
ttccctgacctgtttttgtgtttat

SEQ ID NO: 317416 - DNA, 25 bp, Probe Sequence
ttccctgacctgtttttgtgtttat

SEQ ID NO: 317417 - DNA, 25 bp, Probe Sequence
ttccttgacctcattatttgtccta

SEQ ID NO: 317418 - DNA, 25 bp, Probe Sequence
ttccgtaagctctttattggtggct

SEQ ID NO: 317419 - DNA, 25 bp, Probe Sequence
ttcctggaagcgtgactctggtggc

SEQ ID NO: 317420 - DNA, 25 bp, Probe Sequence
ttcctgggtggtaacctgggatcca

SEQ ID NO: 317421 - DNA, 25 bp, Probe Sequence
ttcctaagtggtaccatctggtccc

SEQ ID NO: 317422 - DNA, 25 bp, Probe Sequence
ttccgagactggatcgatggtgttc

SEQ ID NO: 317423 - DNA, 25 bp, Probe Sequence
ttcctgagaggggccgcatggatgt

SEQ ID NO: 317424 - DNA, 25 bp, Probe Sequence
ttccacacaggggcctcatggcatg

SEQ ID NO: 317425 - DNA, 25 bp, Probe Sequence
ttgccaacttgggccatgggcttta

SEQ ID NO: 317426 - DNA, 25 bp, Probe Sequence
ttgcacactttggcccagggtggcc

SEQ ID NO: 317427 - DNA, 25 bp, Probe Sequence
ttgcacactttggcccagggtggcc

SEQ ID NO: 317428 - DNA, 25 bp, Probe Sequence
ttgcccttcgcagcaaaggctgtga

SEQ ID NO: 317429 - DNA, 25 bp, Probe Sequence
ttgaacttgacagcatataacttaa

SEQ ID NO: 317430 - DNA, 25 bp, Probe Sequence
ttgaatcgtccttataacagcttat

SEQ ID NO: 317431 - DNA, 25 bp, Probe Sequence
ttgaacgtgctataggaccttctca

SEQ ID NO: 317432 - DNA, 25 bp, Probe Sequence
ttgggaggcagttggtacctttcaa

SEQ ID NO: 317433 - DNA, 25 bp, Probe Sequence
ttgaccgccaattgggccggttaag

SEQ ID NO: 317434 - DNA, 25 bp, Probe Sequence
ttgaacgccaaattgggcctgtaag

SEQ ID NO: 317435 - DNA, 25 bp, Probe Sequence
ttgaaagactattgcaggtgtttaa

SEQ ID NO: 317436 - DNA, 25 bp, Probe Sequence
ttgtgacaggcaataaaattttaag

SEQ ID NO: 317437 - DNA, 25 bp, Probe Sequence
ttgctggacgtttgaactctgttaa

SEQ ID NO: 317438 - DNA, 25 bp, Probe Sequence
ttgtcttctttggaactttgtacac

SEQ ID NO: 317439 - DNA, 25 bp, Probe Sequence
ttgagtcctttggggatctgtccac

SEQ ID NO: 317440 - DNA, 25 bp, Probe Sequence
ttgagtcctttggggatctgtccac

SEQ ID NO: 317441 - DNA, 25 bp, Probe Sequence
ttggtactgggcaggattggcaaca

SEQ ID NO: 317442 - DNA, 25 bp, Probe Sequence
ttggtgattgggaggcagttggtac

SEQ ID NO: 317443 - DNA, 25 bp, Probe Sequence
ttggtggtggtcttggacgtggttt

SEQ ID NO: 317444 - DNA, 25 bp, Probe Sequence
ttgaccctcagttctggacgtgtgt

SEQ ID NO: 317445 - DNA, 25 bp, Probe Sequence
ttggccattggtactgggcaggatt

SEQ ID NO: 317446 - DNA, 25 bp, Probe Sequence
ttggatgattgtcaccggaggtata

SEQ ID NO: 317447 - DNA, 25 bp, Probe Sequence
ttgaatgatttcccactcagggcct

SEQ ID NO: 317448 - DNA, 25 bp, Probe Sequence
ttgcaaatggatgccccagtgtccg

SEQ ID NO: 317449 - DNA, 25 bp, Probe Sequence
ttgaatcggtagtcccagttcttgc

SEQ ID NO: 317450 - DNA, 25 bp, Probe Sequence
ttgaatgcggtgtagaaatgtttac

SEQ ID NO: 317451 - DNA, 25 bp, Probe Sequence
ttccactgattgtgataatggtttc

SEQ ID NO: 317452 - DNA, 25 bp, Probe Sequence
ttccactatttgcagaggcttattc

SEQ ID NO: 317453 - DNA, 25 bp, Probe Sequence
ttccatatatttcccagtcatttta

SEQ ID NO: 317454 - DNA, 25 bp, Probe Sequence
ttgtactcagagagccttattttat

SEQ ID NO: 317455 - DNA, 25 bp, Probe Sequence
ttgtactgcgtatgcagtttttcct

SEQ ID NO: 317456 - DNA, 25 bp, Probe Sequence
ttgctagaagtcatgagtcttttca

SEQ ID NO: 317457 - DNA, 25 bp, Probe Sequence
ttgtcaatcccaaagccttttcgac

SEQ ID NO: 317458 - DNA, 25 bp, Probe Sequence
ttgccattcccttaggctttagcag

SEQ ID NO: 317459 - DNA, 25 bp, Probe Sequence
ttgcctggcaccaaagtaaacgcag

SEQ ID NO: 317460 - DNA, 25 bp, Probe Sequence
ttcctggcactcaaattcatgacta

SEQ ID NO: 317461 - DNA, 25 bp, Probe Sequence
ttcctgctgcaccaaagtagttcac

SEQ ID NO: 317462 - DNA, 25 bp, Probe Sequence
ttcctgctcacttgcaagtacaatc

SEQ ID NO: 317463 - DNA, 25 bp, Probe Sequence
ttcctcatctctggctagggcaaca

SEQ ID NO: 317464 - DNA, 25 bp, Probe Sequence
ttcctcagattagatgtgccaataa

SEQ ID NO: 317465 - DNA, 25 bp, Probe Sequence
ttgcccagcctagtactgtcagaaa

SEQ ID NO: 317466 - DNA, 25 bp, Probe Sequence
ttcctgcagccttctactttaaagt

SEQ ID NO: 317467 - DNA, 25 bp, Probe Sequence
ttcctctagctgtctggctgtataa

SEQ ID NO: 317468 - DNA, 25 bp, Probe Sequence
ttggtcgcagctactgagggatgaa

SEQ ID NO: 317469 - DNA, 25 bp, Probe Sequence
ttgccttgatgtactggagcaatca

SEQ ID NO: 317470 - DNA, 25 bp, Probe Sequence
ttccaggatcatactcagagaccat

SEQ ID NO: 317471 - DNA, 25 bp, Probe Sequence
ttccagtgtttgacagtgtgccatt

SEQ ID NO: 317472 - DNA, 25 bp, Probe Sequence
ttgccgattcaccagcacttgctcg

SEQ ID NO: 317473 - DNA, 25 bp, Probe Sequence
ttggctacgaaatgcttgctcaggc

SEQ ID NO: 317474 - DNA, 25 bp, Probe Sequence
ttggtacaagcttatgctgtcttaa

SEQ ID NO: 317475 - DNA, 25 bp, Probe Sequence
ttgagtacaggcttaatctgcctac

SEQ ID NO: 317476 - DNA, 25 bp, Probe Sequence
ttgaaacaagtctctcacctgagcc

SEQ ID NO: 317477 - DNA, 25 bp, Probe Sequence
ttgtaaagagtctgccttctggatc

SEQ ID NO: 317478 - DNA, 25 bp, Probe Sequence
ttgcaaaaggtggcccttcactgtc

SEQ ID NO: 317479 - DNA, 25 bp, Probe Sequence
ttgacagatggtatcccttcctgga

SEQ ID NO: 317480 - DNA, 25 bp, Probe Sequence
ttgctcagaagtggatgcaccccca

SEQ ID NO: 317481 - DNA, 25 bp, Probe Sequence
ttgtcgaagcattaaacagcctcat

SEQ ID NO: 317482 - DNA, 25 bp, Probe Sequence
ttgcatctgggcttaaacccatagg

SEQ ID NO: 317483 - DNA, 25 bp, Probe Sequence
ttgcctgtggcataaacccggaaaa

SEQ ID NO: 317484 - DNA, 25 bp, Probe Sequence
ttgcctgaagcatagggcctttaaa

SEQ ID NO: 317485 - DNA, 25 bp, Probe Sequence
ttgccagaacaccatggggcttgga

SEQ ID NO: 317486 - DNA, 25 bp, Probe Sequence
ttgccagtgtacctgctggtggggc

SEQ ID NO: 317487 - DNA, 25 bp, Probe Sequence
ttgccagtgcgggccaagctggccc

SEQ ID NO: 317488 - DNA, 25 bp, Probe Sequence
ttgccctggggcagatggtgagctc

SEQ ID NO: 317489 - DNA, 25 bp, Probe Sequence
ttcccgctgctggtgtgggtgacat

SEQ ID NO: 317490 - DNA, 25 bp, Probe Sequence
ttgcgccagtggagtgggtgaaagg

SEQ ID NO: 317491 - DNA, 25 bp, Probe Sequence
ttgccagcattgatgaacggatgaa

SEQ ID NO: 317492 - DNA, 25 bp, Probe Sequence
ttgcatcacctgactataccttact

SEQ ID NO: 317493 - DNA, 25 bp, Probe Sequence
ttgcattcctatttccctaagatct

SEQ ID NO: 317494 - DNA, 25 bp, Probe Sequence
ttcctccattgttgccctggaatgt

SEQ ID NO: 317495 - DNA, 25 bp, Probe Sequence
ttcctctcaagctagcccagagggt

SEQ ID NO: 317496 - DNA, 25 bp, Probe Sequence
ttccaccagcactacctgggtggtc

SEQ ID NO: 317497 - DNA, 25 bp, Probe Sequence
ttccatccaaaaggggcagggcacg

SEQ ID NO: 317498 - DNA, 25 bp, Probe Sequence
ttccttcaaagagggcctgcctggc

SEQ ID NO: 317499 - DNA, 25 bp, Probe Sequence
ttcctcctaagaggcagcttcttcc

SEQ ID NO: 317500 - DNA, 25 bp, Probe Sequence
ttccatccataaatccagttctact

SEQ ID NO: 317501 - DNA, 25 bp, Probe Sequence
ttgctcttcacataaagcttgctac

SEQ ID NO: 317502 - DNA, 25 bp, Probe Sequence
ttgctttgcgcatatcaggcttagg

SEQ ID NO: 317503 - DNA, 25 bp, Probe Sequence
ttcctctgcgcttccagtgataagg

SEQ ID NO: 317504 - DNA, 25 bp, Probe Sequence
ttcctctgcgcttccagtgataagg

SEQ ID NO: 317505 - DNA, 25 bp, Probe Sequence
ttccactctgcaatccagttaccag

SEQ ID NO: 317506 - DNA, 25 bp, Probe Sequence
ttccactgaagtggcagtctacgac

SEQ ID NO: 317507 - DNA, 25 bp, Probe Sequence
ttgccaagagaggtggatccactga

SEQ ID NO: 317508 - DNA, 25 bp, Probe Sequence
ttcctgtgcacaggtggacggcgat

SEQ ID NO: 317509 - DNA, 25 bp, Probe Sequence
ttccttggcagcctgaagcgccaga

SEQ ID NO: 317510 - DNA, 25 bp, Probe Sequence
ttcctgcatgccagaggagcccaag

SEQ ID NO: 317511 - DNA, 25 bp, Probe Sequence
ttcctgcgaatgaagaggcccgggg

SEQ ID NO: 317512 - DNA, 25 bp, Probe Sequence
ttcctgaggatgggcaacccccagg

SEQ ID NO: 317513 - DNA, 25 bp, Probe Sequence
ttccgagtgtgagcacagctccctc

SEQ ID NO: 317514 - DNA, 25 bp, Probe Sequence
ttccagaaggcaccagagcccttgg

SEQ ID NO: 317515 - DNA, 25 bp, Probe Sequence
ttccagagcaccacagggcactgtg

SEQ ID NO: 317516 - DNA, 25 bp, Probe Sequence
ttccaaccccagaaatgcctgctgg

SEQ ID NO: 317517 - DNA, 25 bp, Probe Sequence
ttccacgcaccgatcagtactggga

SEQ ID NO: 317518 - DNA, 25 bp, Probe Sequence
ttgcaaaccttgacgggactgggag

SEQ ID NO: 317519 - DNA, 25 bp, Probe Sequence
ttgcaaaccctgagctcaacttgga

SEQ ID NO: 317520 - DNA, 25 bp, Probe Sequence
ttgcaacacccatgtgcctttgatg

SEQ ID NO: 317521 - DNA, 25 bp, Probe Sequence
ttgcaaccacagtattcctttgtct

SEQ ID NO: 317522 - DNA, 25 bp, Probe Sequence
ttcctcttagtattcctttgtataa

SEQ ID NO: 317523 - DNA, 25 bp, Probe Sequence
ttccttcttttgtttaggatcataa

SEQ ID NO: 317524 - DNA, 25 bp, Probe Sequence
ttgccttcattagtggtttgagaaa

SEQ ID NO: 317525 - DNA, 25 bp, Probe Sequence
ttgccttcctcatgggttacagtga

SEQ ID NO: 317526 - DNA, 25 bp, Probe Sequence
ttgccttatctaggtggtccatagg

SEQ ID NO: 317527 - DNA, 25 bp, Probe Sequence
ttcctgtgctctaggtgggctaagt

SEQ ID NO: 317528 - DNA, 25 bp, Probe Sequence
ttccagtgcctgacttgggatagga

SEQ ID NO: 317529 - DNA, 25 bp, Probe Sequence
ttccagctcctccctggagaagagc

SEQ ID NO: 317530 - DNA, 25 bp, Probe Sequence
ttgccagacccaccattagagagtg

SEQ ID NO: 317531 - DNA, 25 bp, Probe Sequence
ttgcctgaccacttcagctgcagga

SEQ ID NO: 317532 - DNA, 25 bp, Probe Sequence
ttccgatacagcagcatggaggatc

SEQ ID NO: 317533 - DNA, 25 bp, Probe Sequence
ttgcctactcgcagcttcgagatca

SEQ ID NO: 317534 - DNA, 25 bp, Probe Sequence
ttgctgtcccctttgacgatgatga

SEQ ID NO: 317535 - DNA, 25 bp, Probe Sequence
ttgctgtcccctttgacgatgatga

SEQ ID NO: 317536 - DNA, 25 bp, Probe Sequence
ttcctactccatttgcaagtcatgc

SEQ ID NO: 317537 - DNA, 25 bp, Probe Sequence
ttcctggatccaagataatgtctcc

SEQ ID NO: 317538 - DNA, 25 bp, Probe Sequence
ttcctggcctattatgagatctgcc

SEQ ID NO: 317539 - DNA, 25 bp, Probe Sequence
ttcctgggcttctatgtgctggaca

SEQ ID NO: 317540 - DNA, 25 bp, Probe Sequence
ttcctgtggctgacgtcatctggag

SEQ ID NO: 317541 - DNA, 25 bp, Probe Sequence
ttgccaagcgcgagctactgtgggc

SEQ ID NO: 317542 - DNA, 25 bp, Probe Sequence
ttgccgctggagaggactgtgtggt

SEQ ID NO: 317543 - DNA, 25 bp, Probe Sequence
ttgcagagatgaaggccgccatgtt

SEQ ID NO: 317544 - DNA, 25 bp, Probe Sequence
ttggatgtcaagtgcctagttcagt

SEQ ID NO: 317545 - DNA, 25 bp, Probe Sequence
ttgaagaatcagtggtaggagcagt

SEQ ID NO: 317546 - DNA, 25 bp, Probe Sequence
ttgaagggcagtcttctctggcttg

SEQ ID NO: 317547 - DNA, 25 bp, Probe Sequence
ttgtagggatgcctttctagtccta

SEQ ID NO: 317548 - DNA, 25 bp, Probe Sequence
ttccagtagttcattctaatgccta

SEQ ID NO: 317549 - DNA, 25 bp, Probe Sequence
ttccggggtggtcatgacatcctgg

SEQ ID NO: 317550 - DNA, 25 bp, Probe Sequence
ttccggagaaagacgatgccctctg

SEQ ID NO: 317551 - DNA, 25 bp, Probe Sequence
ttccgagtgaacctgcggacgctgc

SEQ ID NO: 317552 - DNA, 25 bp, Probe Sequence
ttcctagctacatctggtaccttgg

SEQ ID NO: 317553 - DNA, 25 bp, Probe Sequence
ttgccatggcaaaacaggtaccttt

SEQ ID NO: 317554 - DNA, 25 bp, Probe Sequence
ttgacagcgacaagaagtggggctt

SEQ ID NO: 317555 - DNA, 25 bp, Probe Sequence
ttggtcagctcaagaactgggttct

SEQ ID NO: 317556 - DNA, 25 bp, Probe Sequence
ttgcttcaaaagcagtggactgtct

SEQ ID NO: 317557 - DNA, 25 bp, Probe Sequence
ttgctggctataagcggggtctccg

SEQ ID NO: 317558 - DNA, 25 bp, Probe Sequence
ttgctggctataagcggggtctccg

SEQ ID NO: 317559 - DNA, 25 bp, Probe Sequence
ttgctggctataagcggggtctccg

SEQ ID NO: 317560 - DNA, 25 bp, Probe Sequence
ttgctgcgcagatttgcagggttga

SEQ ID NO: 317561 - DNA, 25 bp, Probe Sequence
ttgtgctcaataaggtggattcaga

SEQ ID NO: 317562 - DNA, 25 bp, Probe Sequence
ttggcatcccagatgggagcacagg

SEQ ID NO: 317563 - DNA, 25 bp, Probe Sequence
ttcctcctcacagtagaggccatgg

SEQ ID NO: 317564 - DNA, 25 bp, Probe Sequence
ttcctggtacagctgacccattgtg

SEQ ID NO: 317565 - DNA, 25 bp, Probe Sequence
ttccggaacattaagaccattgctg

SEQ ID NO: 317566 - DNA, 25 bp, Probe Sequence
ttcctgccagatattagggcttgct

SEQ ID NO: 317567 - DNA, 25 bp, Probe Sequence
ttcctcccaatttatggtttcccag

SEQ ID NO: 317568 - DNA, 25 bp, Probe Sequence
ttccttccaatagttagatctaccc

SEQ ID NO: 317569 - DNA, 25 bp, Probe Sequence
ttccaacataatggattaatgttcc

SEQ ID NO: 317570 - DNA, 25 bp, Probe Sequence
ttccagccataagtgactctgagct

SEQ ID NO: 317571 - DNA, 25 bp, Probe Sequence
ttcctcctggcagaatgctagctct

SEQ ID NO: 317572 - DNA, 25 bp, Probe Sequence
ttcctcctggcagaatgctagctct

SEQ ID NO: 317573 - DNA, 25 bp, Probe Sequence
ttgcctcacatccgaaagtcagtct

SEQ ID NO: 317574 - DNA, 25 bp, Probe Sequence
ttgcctcaatgccagtaacgcgtct

SEQ ID NO: 317575 - DNA, 25 bp, Probe Sequence
ttgattcattgccgtaatagagcca

SEQ ID NO: 317576 - DNA, 25 bp, Probe Sequence
ttgtgtgcagtcagtttccaccaac

SEQ ID NO: 317577 - DNA, 25 bp, Probe Sequence
ttgttagccatccattatcgcatct

SEQ ID NO: 317578 - DNA, 25 bp, Probe Sequence
ttgttacctatgatatggttccaga

SEQ ID NO: 317579 - DNA, 25 bp, Probe Sequence
ttgtagcactttgttgacttccatg

SEQ ID NO: 317580 - DNA, 25 bp, Probe Sequence
ttgtacctgtgttcagtggttcctg

SEQ ID NO: 317581 - DNA, 25 bp, Probe Sequence
ttgtcactttgggcatggcagcttc

SEQ ID NO: 317582 - DNA, 25 bp, Probe Sequence
ttgggctttcccaagcagttctatt

SEQ ID NO: 317583 - DNA, 25 bp, Probe Sequence
ttgcgcagtttccctggaatctttt

SEQ ID NO: 317584 - DNA, 25 bp, Probe Sequence
ttggcaaatctccctaaactatgtg

SEQ ID NO: 317585 - DNA, 25 bp, Probe Sequence
ttgggagaattgttgcaaagtagtg

SEQ ID NO: 317586 - DNA, 25 bp, Probe Sequence
ttgtcaaaatagtccaccagtgatt

SEQ ID NO: 317587 - DNA, 25 bp, Probe Sequence
ttcctaacatggcccacacgttgta

SEQ ID NO: 317588 - DNA, 25 bp, Probe Sequence
ttcctaagcagagctcgcagcgtgg

SEQ ID NO: 317589 - DNA, 25 bp, Probe Sequence
ttcctatggcggccctgagtgtgag

SEQ ID NO: 317590 - DNA, 25 bp, Probe Sequence
ttccttggtgcgacactgtgcattg

SEQ ID NO: 317591 - DNA, 25 bp, Probe Sequence
ttccgatttgcttcagcttgtatga

SEQ ID NO: 317592 - DNA, 25 bp, Probe Sequence
ttccttgttgcttacttctgtgggt

SEQ ID NO: 317593 - DNA, 25 bp, Probe Sequence
ttcctggttgtcacttaatgggctg

SEQ ID NO: 317594 - DNA, 25 bp, Probe Sequence
ttgcgggccttcaagttattgggct

SEQ ID NO: 317595 - DNA, 25 bp, Probe Sequence
ttgtgtccctgtgggtggacgtggt

SEQ ID NO: 317596 - DNA, 25 bp, Probe Sequence
ttgtttcctggcaatacgacgtggg

SEQ ID NO: 317597 - DNA, 25 bp, Probe Sequence
ttgtttcctgggtactgggcatgtg

SEQ ID NO: 317598 - DNA, 25 bp, Probe Sequence
ttccttccggtgtcactgaggtggt

SEQ ID NO: 317599 - DNA, 25 bp, Probe Sequence
ttccattcctcactgaaggtggggt

SEQ ID NO: 317600 - DNA, 25 bp, Probe Sequence
ttccattcctcccaaggtggcaaaa

SEQ ID NO: 317601 - DNA, 25 bp, Probe Sequence
ttccttgctccgcagaagagagtaa

SEQ ID NO: 317602 - DNA, 25 bp, Probe Sequence
ttcctctctcaagatgaagatgttc

SEQ ID NO: 317603 - DNA, 25 bp, Probe Sequence
ttgcctgctgcctcgtgaagagtat

SEQ ID NO: 317604 - DNA, 25 bp, Probe Sequence
ttgccatgctggctggtggaagagt

SEQ ID NO: 317605 - DNA, 25 bp, Probe Sequence
ttccatcctggtctggacaaatatt

SEQ ID NO: 317606 - DNA, 25 bp, Probe Sequence
ttgccagcttttctaagcaaataga

SEQ ID NO: 317607 - DNA, 25 bp, Probe Sequence
ttgtctcttttcaaaccaaattggg

SEQ ID NO: 317608 - DNA, 25 bp, Probe Sequence
ttgatgctatgctcctaatccaacc

SEQ ID NO: 317609 - DNA, 25 bp, Probe Sequence
ttgacgtcaacggaatcgctatctc

SEQ ID NO: 317610 - DNA, 25 bp, Probe Sequence
ttgtagtcaacggtcagcttgttgg

SEQ ID NO: 317611 - DNA, 25 bp, Probe Sequence
ttgtagtgccactgttgttttgggg

SEQ ID NO: 317612 - DNA, 25 bp, Probe Sequence
ttgggacacctttcgaactgtgggg

SEQ ID NO: 317613 - DNA, 25 bp, Probe Sequence
ttgggtcggcctcctgaaatgatag

SEQ ID NO: 317614 - DNA, 25 bp, Probe Sequence
ttgaggagggagccttaaggaaggt

SEQ ID NO: 317615 - DNA, 25 bp, Probe Sequence
ttgaggagggacccaactttccgct

SEQ ID NO: 317616 - DNA, 25 bp, Probe Sequence
ttgcaggggggagcagactctcatc

SEQ ID NO: 317617 - DNA, 25 bp, Probe Sequence
ttgcaggaggccacactgatgttct

SEQ ID NO: 317618 - DNA, 25 bp, Probe Sequence
ttgcacgggactggacatggtgttg

SEQ ID NO: 317619 - DNA, 25 bp, Probe Sequence
ttgccaggagttgtctgcgagattg

SEQ ID NO: 317620 - DNA, 25 bp, Probe Sequence
ttcctggagttgacactggcagaag

SEQ ID NO: 317621 - DNA, 25 bp, Probe Sequence
ttccttgctttgaccactgcatgaa

SEQ ID NO: 317622 - DNA, 25 bp, Probe Sequence
ttccattgtatcagcccctgacaga

SEQ ID NO: 317623 - DNA, 25 bp, Probe Sequence
ttcctcttctcatccacctgagaaa

SEQ ID NO: 317624 - DNA, 25 bp, Probe Sequence
ttgccctgtctactaacacaaccaa

SEQ ID NO: 317625 - DNA, 25 bp, Probe Sequence
ttccactgtgctattacaaattttc

SEQ ID NO: 317626 - DNA, 25 bp, Probe Sequence
ttccaatgagcttaaaacatttttc

SEQ ID NO: 317627 - DNA, 25 bp, Probe Sequence
ttccaatgatttttacactatattc

SEQ ID NO: 317628 - DNA, 25 bp, Probe Sequence
ttccaatcatcccatcataaatact

SEQ ID NO: 317629 - DNA, 25 bp, Probe Sequence
ttgccatcatcattccctagaaact

SEQ ID NO: 317630 - DNA, 25 bp, Probe Sequence
ttgctacagcaagctctggataaat

SEQ ID NO: 317631 - DNA, 25 bp, Probe Sequence
ttgcccgcaaggccctgaatgatgt

SEQ ID NO: 317632 - DNA, 25 bp, Probe Sequence
ttcctccagggacatacatatgcat

SEQ ID NO: 317633 - DNA, 25 bp, Probe Sequence
ttgccatctgcgtgacaataaacat

SEQ ID NO: 317634 - DNA, 25 bp, Probe Sequence
ttgtcgtgcctacaatcaagaattc

SEQ ID NO: 317635 - DNA, 25 bp, Probe Sequence
ttgtccccgcactagtagagaatcc

SEQ ID NO: 317636 - DNA, 25 bp, Probe Sequence
ttgtccacaacctgctcaaaataca

SEQ ID NO: 317637 - DNA, 25 bp, Probe Sequence
ttggaccaaccatcatctcgaatgt

SEQ ID NO: 317638 - DNA, 25 bp, Probe Sequence
ttgggaccaccagttcagagaattc

SEQ ID NO: 317639 - DNA, 25 bp, Probe Sequence
ttggatcacctatgttaaaacctta

SEQ ID NO: 317640 - DNA, 25 bp, Probe Sequence
ttgagttcagttgttataaaccatt

SEQ ID NO: 317641 - DNA, 25 bp, Probe Sequence
ttgttatcagtagagtttccccatc

SEQ ID NO: 317642 - DNA, 25 bp, Probe Sequence
ttgtcttcacaagaccttattctct

SEQ ID NO: 317643 - DNA, 25 bp, Probe Sequence
ttgtccccaacctgttttgagtaga

SEQ ID NO: 317644 - DNA, 25 bp, Probe Sequence
ttgcccccaaaggtattttgtgtct

SEQ ID NO: 317645 - DNA, 25 bp, Probe Sequence
ttcctccaagagttgtgcttttgtg

SEQ ID NO: 317646 - DNA, 25 bp, Probe Sequence
ttcctccaagagttgtgcttttgtg

SEQ ID NO: 317647 - DNA, 25 bp, Probe Sequence
ttcctcctgaaactagtctctgtag

SEQ ID NO: 317648 - DNA, 25 bp, Probe Sequence
ttgctccctgattaaagtgccttca

SEQ ID NO: 317649 - DNA, 25 bp, Probe Sequence
ttgccgcgccaaataatgtctctgt

SEQ ID NO: 317650 - DNA, 25 bp, Probe Sequence
ttgccggtacatacaagtggtatca

SEQ ID NO: 317651 - DNA, 25 bp, Probe Sequence
ttgcctcttgacataattggtatat

SEQ ID NO: 317652 - DNA, 25 bp, Probe Sequence
ttgctgtctacaggtttctttcaga

SEQ ID NO: 317653 - DNA, 25 bp, Probe Sequence
ttgctgtctacaggtttctttcaga

SEQ ID NO: 317654 - DNA, 25 bp, Probe Sequence
ttccttcacatcctgtgtttctagg

SEQ ID NO: 317655 - DNA, 25 bp, Probe Sequence
ttgtattcatatctatttgcatttg

SEQ ID NO: 317656 - DNA, 25 bp, Probe Sequence
ttgttctctgatgttttttagtcta

SEQ ID NO: 317657 - DNA, 25 bp, Probe Sequence
ttgcagttcttaggtttgttggtta

SEQ ID NO: 317658 - DNA, 25 bp, Probe Sequence
ttgcgtctctaagggtttctgtgat

SEQ ID NO: 317659 - DNA, 25 bp, Probe Sequence
ttgactctataagcaaattgctttt

SEQ ID NO: 317660 - DNA, 25 bp, Probe Sequence
ttccattaacagcaattattatatt

SEQ ID NO: 317661 - DNA, 25 bp, Probe Sequence
ttccttcactcccattaattaatta

SEQ ID NO: 317662 - DNA, 25 bp, Probe Sequence
ttccttcctcatgcatatcaattag

SEQ ID NO: 317663 - DNA, 25 bp, Probe Sequence
ttccttcctgtgaatgtcactgacg

SEQ ID NO: 317664 - DNA, 25 bp, Probe Sequence
ttcctctgttatagcattcaatgac

SEQ ID NO: 317665 - DNA, 25 bp, Probe Sequence
ttcctttgatagccattcagtgaaa

SEQ ID NO: 317666 - DNA, 25 bp, Probe Sequence
ttccattcagtgccacaccagtgaa

SEQ ID NO: 317667 - DNA, 25 bp, Probe Sequence
ttccagacagctcaatctcgatgta

SEQ ID NO: 317668 - DNA, 25 bp, Probe Sequence
ttccagagtgtggtatgcttttcac

SEQ ID NO: 317669 - DNA, 25 bp, Probe Sequence
ttcctgagactggatctgttcaaac

SEQ ID NO: 317670 - DNA, 25 bp, Probe Sequence
ttcctccatcttacgttcaaactaa

SEQ ID NO: 317671 - DNA, 25 bp, Probe Sequence
ttcctatattgtatttctaatcaga

SEQ ID NO: 317672 - DNA, 25 bp, Probe Sequence
ttccttcactgatttgctttaaaaa

SEQ ID NO: 317673 - DNA, 25 bp, Probe Sequence
ttcctcccatactgcttttaaacag

SEQ ID NO: 317674 - DNA, 25 bp, Probe Sequence
ttcctcattctgtcaccttttaaac

SEQ ID NO: 317675 - DNA, 25 bp, Probe Sequence
ttcctcattctgtcaccttttaaac

SEQ ID NO: 317676 - DNA, 25 bp, Probe Sequence
ttcctcattctgtcaccttttaaac

SEQ ID NO: 317677 - DNA, 25 bp, Probe Sequence
ttcctcattctgtcaccttttaaac

SEQ ID NO: 317678 - DNA, 25 bp, Probe Sequence
ttgcctcacctgacaatgttttaaa

SEQ ID NO: 317679 - DNA, 25 bp, Probe Sequence
ttgcttgagccgaggcgtttgaatc

SEQ ID NO: 317680 - DNA, 25 bp, Probe Sequence
ttgtaaacgacgtgtttgagcagct

SEQ ID NO: 317681 - DNA, 25 bp, Probe Sequence
ttgaaggacccgtatgtttccagtt

SEQ ID NO: 317682 - DNA, 25 bp, Probe Sequence
ttccagttttagtgattctccattt

SEQ ID NO: 317683 - DNA, 25 bp, Probe Sequence
ttcctgttttgtacgagtgcctcat

SEQ ID NO: 317684 - DNA, 25 bp, Probe Sequence
ttccattttcctacaggcagtctct

SEQ ID NO: 317685 - DNA, 25 bp, Probe Sequence
ttccttttcctcacaagtcatcatg

SEQ ID NO: 317686 - DNA, 25 bp, Probe Sequence
ttgccttattgctacttcaagctct

SEQ ID NO: 317687 - DNA, 25 bp, Probe Sequence
ttgcctctgttttttgcaaggggag

SEQ ID NO: 317688 - DNA, 25 bp, Probe Sequence
ttgaccattttttcccagagaagag

SEQ ID NO: 317689 - DNA, 25 bp, Probe Sequence
ttgaccatttttgatgtccattgga

SEQ ID NO: 317690 - DNA, 25 bp, Probe Sequence
ttccatattgtccttttctcttgga

SEQ ID NO: 317691 - DNA, 25 bp, Probe Sequence
ttgcctttgggttttctgtacagat

SEQ ID NO: 317692 - DNA, 25 bp, Probe Sequence
ttgacattccggaaatttggatcga

SEQ ID NO: 317693 - DNA, 25 bp, Probe Sequence
ttccttccagggccatgcttggcaa

SEQ ID NO: 317694 - DNA, 25 bp, Probe Sequence
ttcctgaagcagctggctagtggct

SEQ ID NO: 317695 - DNA, 25 bp, Probe Sequence
ttcctgagacagatgctcaagtgag

SEQ ID NO: 317696 - DNA, 25 bp, Probe Sequence
ttgcctgaacagaatcatccttaaa

SEQ ID NO: 317697 - DNA, 25 bp, Probe Sequence
ttcctgctcacactccagaattaaa

SEQ ID NO: 317698 - DNA, 25 bp, Probe Sequence
ttccagctgctaatccacaattgta

SEQ ID NO: 317699 - DNA, 25 bp, Probe Sequence
ttcctgcctttggcatctgttgcaa

SEQ ID NO: 317700 - DNA, 25 bp, Probe Sequence
ttcctcctgtagatgctgtgcatgc

SEQ ID NO: 317701 - DNA, 25 bp, Probe Sequence
ttcctcctgtagatgctgtgcatgc

SEQ ID NO: 317702 - DNA, 25 bp, Probe Sequence
ttgaatccatgaaattgctatgcta

SEQ ID NO: 317703 - DNA, 25 bp, Probe Sequence
ttccaaatatgtagactatgctata

SEQ ID NO: 317704 - DNA, 25 bp, Probe Sequence
ttccaacttgtttcacgctatatca

SEQ ID NO: 317705 - DNA, 25 bp, Probe Sequence
ttccaacctttaactctgtatcagt

SEQ ID NO: 317706 - DNA, 25 bp, Probe Sequence
ttgcctactttaacacctgtcagag

SEQ ID NO: 317707 - DNA, 25 bp, Probe Sequence
ttggctcctttagcactataagggc

SEQ ID NO: 317708 - DNA, 25 bp, Probe Sequence
ttgatttgtttagactgaaggaaga

SEQ ID NO: 317709 - DNA, 25 bp, Probe Sequence
ttgcattttgacatccctgaagggg

SEQ ID NO: 317710 - DNA, 25 bp, Probe Sequence
ttgcattttgacatccctgaagggg

SEQ ID NO: 317711 - DNA, 25 bp, Probe Sequence
ttgcattttgacatccctgaagggg

SEQ ID NO: 317712 - DNA, 25 bp, Probe Sequence
ttgccatgtagaccccttgaagagg

SEQ ID NO: 317713 - DNA, 25 bp, Probe Sequence
ttgccccagacctgctggagcaagg

SEQ ID NO: 317714 - DNA, 25 bp, Probe Sequence
ttgccaaagctctgggtgacacgtg

SEQ ID NO: 317715 - DNA, 25 bp, Probe Sequence
ttccagaggcgctacggtggcatca

SEQ ID NO: 317716 - DNA, 25 bp, Probe Sequence
ttgccaagtggcgctgtgtgctgaa

SEQ ID NO: 317717 - DNA, 25 bp, Probe Sequence
ttccatctgatggccactgtatgta

SEQ ID NO: 317718 - DNA, 25 bp, Probe Sequence
ttccatgtgattgccctttcatatg

SEQ ID NO: 317719 - DNA, 25 bp, Probe Sequence
ttccatttattcccttgttagcaag

SEQ ID NO: 317720 - DNA, 25 bp, Probe Sequence
ttcctttcaccatcatttagaaatg

SEQ ID NO: 317721 - DNA, 25 bp, Probe Sequence
ttcctcatacaagtaaacacagaaa

SEQ ID NO: 317722 - DNA, 25 bp, Probe Sequence
ttgcctgtacaagaacctatgaaga

SEQ ID NO: 317723 - DNA, 25 bp, Probe Sequence
ttccttcaagatacagacccagatt

SEQ ID NO: 317724 - DNA, 25 bp, Probe Sequence
ttccttcagatgtctcaacactgca

SEQ ID NO: 317725 - DNA, 25 bp, Probe Sequence
ttgcgcttagtgtcctacatggggt

SEQ ID NO: 317726 - DNA, 25 bp, Probe Sequence
ttgccacacaggtagttcggggatg

SEQ ID NO: 317727 - DNA, 25 bp, Probe Sequence
ttggacagcgtgggtatcgaggcgg

SEQ ID NO: 317728 - DNA, 25 bp, Probe Sequence
ttgagaagccttcgcttcgaagcga

SEQ ID NO: 317729 - DNA, 25 bp, Probe Sequence
ttgagaagccttcgcttcgaagcga

SEQ ID NO: 317730 - DNA, 25 bp, Probe Sequence
ttccaacctgcttcttcaaacagaa

SEQ ID NO: 317731 - DNA, 25 bp, Probe Sequence
ttgacaacctgtatcccaagcagcg

SEQ ID NO: 317732 - DNA, 25 bp, Probe Sequence
ttgaagaactatgatccccagaagg

SEQ ID NO: 317733 - DNA, 25 bp, Probe Sequence
ttccaggagcgagatccctccaaaa

SEQ ID NO: 317734 - DNA, 25 bp, Probe Sequence
ttgcctggcaggataccttgtccaa

SEQ ID NO: 317735 - DNA, 25 bp, Probe Sequence
ttcctatcggtgtgtctagcaccaa

SEQ ID NO: 317736 - DNA, 25 bp, Probe Sequence
ttccattctagttcttttaccaaga

SEQ ID NO: 317737 - DNA, 25 bp, Probe Sequence
ttgttctctcagtacttgttaccca

SEQ ID NO: 317738 - DNA, 25 bp, Probe Sequence
ttgggcttcggagcatttactctct

SEQ ID NO: 317739 - DNA, 25 bp, Probe Sequence
ttgcccttggtgtaaattacctgca

SEQ ID NO: 317740 - DNA, 25 bp, Probe Sequence
ttcctctgtagttaagtcaccacca

SEQ ID NO: 317741 - DNA, 25 bp, Probe Sequence
ttccttatattctcagcctctgagc

SEQ ID NO: 317742 - DNA, 25 bp, Probe Sequence
ttcctctatttgttcagatctcata

SEQ ID NO: 317743 - DNA, 25 bp, Probe Sequence
ttccaatttcatgttgatgatatac

SEQ ID NO: 317744 - DNA, 25 bp, Probe Sequence
ttccagttcctctttggtgtacaga

SEQ ID NO: 317745 - DNA, 25 bp, Probe Sequence
ttccatttcccttctgatgttaaaa

SEQ ID NO: 317746 - DNA, 25 bp, Probe Sequence
ttccatgtttccttatgcatattta

SEQ ID NO: 317747 - DNA, 25 bp, Probe Sequence
ttccttctctccttaatgacattaa

SEQ ID NO: 317748 - DNA, 25 bp, Probe Sequence
ttccaacttccctacatgcagaaac

SEQ ID NO: 317749 - DNA, 25 bp, Probe Sequence
ttgcaaaattcctgacgagataagc

SEQ ID NO: 317750 - DNA, 25 bp, Probe Sequence
ttgataaatccctcagtcagcaaat

SEQ ID NO: 317751 - DNA, 25 bp, Probe Sequence
ttgcaaaacctgcacaatcagtccc

SEQ ID NO: 317752 - DNA, 25 bp, Probe Sequence
ttccaccatctcagaatgatagtcc

SEQ ID NO: 317753 - DNA, 25 bp, Probe Sequence
ttgtcacctagcagatatgtattac

SEQ ID NO: 317754 - DNA, 25 bp, Probe Sequence
ttgcctgttagtgattgtttcacat

SEQ ID NO: 317755 - DNA, 25 bp, Probe Sequence
ttcctattctgtggtttttccagct

SEQ ID NO: 317756 - DNA, 25 bp, Probe Sequence
ttcctacttaggattttccactcta

SEQ ID NO: 317757 - DNA, 25 bp, Probe Sequence
ttcctacttaggattttccactcta

SEQ ID NO: 317758 - DNA, 25 bp, Probe Sequence
ttgttactgtagcactttttacact

SEQ ID NO: 317759 - DNA, 25 bp, Probe Sequence
ttgaaactgtatcacctttgccaag

SEQ ID NO: 317760 - DNA, 25 bp, Probe Sequence
ttgaacagctgttgtcaacttcaga

SEQ ID NO: 317761 - DNA, 25 bp, Probe Sequence
ttgccatcagttttctgcagtccaa

SEQ ID NO: 317762 - DNA, 25 bp, Probe Sequence
ttgtgctcagaatctacattccaga

SEQ ID NO: 317763 - DNA, 25 bp, Probe Sequence
ttggccagacagtatacccaaactt

SEQ ID NO: 317764 - DNA, 25 bp, Probe Sequence
ttgctcctgacagtcatacctgaaa

SEQ ID NO: 317765 - DNA, 25 bp, Probe Sequence
ttgccacatgacttattttgatatt

SEQ ID NO: 317766 - DNA, 25 bp, Probe Sequence
ttccacattccaatcatttgcacta

SEQ ID NO: 317767 - DNA, 25 bp, Probe Sequence
ttccacattgaagttgtgtgcagtg

SEQ ID NO: 317768 - DNA, 25 bp, Probe Sequence
ttccacttcagggtcaggcttggtt

SEQ ID NO: 317769 - DNA, 25 bp, Probe Sequence
ttccacctcagggtggggcgggcag

SEQ ID NO: 317770 - DNA, 25 bp, Probe Sequence
ttccacctcagggtggggcgggcag

SEQ ID NO: 317771 - DNA, 25 bp, Probe Sequence
ttgaacccaggaggcggaggttgca

SEQ ID NO: 317772 - DNA, 25 bp, Probe Sequence
ttgaacccacgtgggaggagctgga

SEQ ID NO: 317773 - DNA, 25 bp, Probe Sequence
ttgaacaccaagatgagattgagtc

SEQ ID NO: 317774 - DNA, 25 bp, Probe Sequence
ttgaccactcttcagagaatggata

SEQ ID NO: 317775 - DNA, 25 bp, Probe Sequence
ttgagacatcgcatcatcaaaagtt

SEQ ID NO: 317776 - DNA, 25 bp, Probe Sequence
ttgaggctcctttgactaaattaaa

SEQ ID NO: 317777 - DNA, 25 bp, Probe Sequence
ttgaaccctcggatacgatagaaaa

SEQ ID NO: 317778 - DNA, 25 bp, Probe Sequence
ttgacccccaagatactcatcagtc

SEQ ID NO: 317779 - DNA, 25 bp, Probe Sequence
ttgaaccggaacctgagtgacagcc

SEQ ID NO: 317780 - DNA, 25 bp, Probe Sequence
ttgacctccgatgagtagtgacacc

SEQ ID NO: 317781 - DNA, 25 bp, Probe Sequence
ttccagccccagaatgtggtaactc

SEQ ID NO: 317782 - DNA, 25 bp, Probe Sequence
ttccaccctcagcggatgataatct

SEQ ID NO: 317783 - DNA, 25 bp, Probe Sequence
ttgccagccgccatggctgatgaag

SEQ ID NO: 317784 - DNA, 25 bp, Probe Sequence
ttccaggcccttcgagcatggaggg

SEQ ID NO: 317785 - DNA, 25 bp, Probe Sequence
ttccaggcccttcgagcatggaggg

SEQ ID NO: 317786 - DNA, 25 bp, Probe Sequence
ttccacacgcgcttcaagcaggagg

SEQ ID NO: 317787 - DNA, 25 bp, Probe Sequence
ttgcccagcactgtctcatagaagg

SEQ ID NO: 317788 - DNA, 25 bp, Probe Sequence
ttcctcactgctgttcacgagattg

SEQ ID NO: 317789 - DNA, 25 bp, Probe Sequence
ttcctcactgctctaacatgctgaa

SEQ ID NO: 317790 - DNA, 25 bp, Probe Sequence
ttccttcctccttcatcagtgaaga

SEQ ID NO: 317791 - DNA, 25 bp, Probe Sequence
ttccttcctttaatcttatgcaaaa

SEQ ID NO: 317792 - DNA, 25 bp, Probe Sequence
ttccttcatcctaacttctaattaa

SEQ ID NO: 317793 - DNA, 25 bp, Probe Sequence
ttgcctaaccaaacttcttcctaag

SEQ ID NO: 317794 - DNA, 25 bp, Probe Sequence
ttggctaagactattttcccccagt

SEQ ID NO: 317795 - DNA, 25 bp, Probe Sequence
ttgattagaaacgttcttctccccg

SEQ ID NO: 317796 - DNA, 25 bp, Probe Sequence
ttgacaggaagatcaagttctccct

SEQ ID NO: 317797 - DNA, 25 bp, Probe Sequence
ttgacaagaagatcgagttccacct

SEQ ID NO: 317798 - DNA, 25 bp, Probe Sequence
ttgaaaggcagcagggtgcccaggt

SEQ ID NO: 317799 - DNA, 25 bp, Probe Sequence
ttgatgtgaggcgtgtcggttccag

SEQ ID NO: 317800 - DNA, 25 bp, Probe Sequence
ttgggatcacactctagcattgcca

SEQ ID NO: 317801 - DNA, 25 bp, Probe Sequence
ttggaaacacctctgcagtggctga

SEQ ID NO: 317802 - DNA, 25 bp, Probe Sequence
ttgccaaatacttcctcagtggaaa

SEQ ID NO: 317803 - DNA, 25 bp, Probe Sequence
ttgccaagacacaagcttagggata

SEQ ID NO: 317804 - DNA, 25 bp, Probe Sequence
ttccacaagcaccagctgtggccca

SEQ ID NO: 317805 - DNA, 25 bp, Probe Sequence
ttccaatcagatgcagctttctcct

SEQ ID NO: 317806 - DNA, 25 bp, Probe Sequence
ttccaatcagatgcagctttctcct

SEQ ID NO: 317807 - DNA, 25 bp, Probe Sequence
ttgcatgtataatagatttctcctc

SEQ ID NO: 317808 - DNA, 25 bp, Probe Sequence
ttgactatttctgtatgtctccatc

SEQ ID NO: 317809 - DNA, 25 bp, Probe Sequence
ttgcccatctatggtttcattcctc

SEQ ID NO: 317810 - DNA, 25 bp, Probe Sequence
ttgcctatctgacttcatacatccc

SEQ ID NO: 317811 - DNA, 25 bp, Probe Sequence
ttgcgtctggcattgttcaatccag

SEQ ID NO: 317812 - DNA, 25 bp, Probe Sequence
ttgcgattggcttagtcagcttagc

SEQ ID NO: 317813 - DNA, 25 bp, Probe Sequence
ttgcttatgtcattagtgcctcatg

SEQ ID NO: 317814 - DNA, 25 bp, Probe Sequence
ttgccttgtcagagatgcacacacc

SEQ ID NO: 317815 - DNA, 25 bp, Probe Sequence
ttgccaggccatcgtggacacaggc

SEQ ID NO: 317816 - DNA, 25 bp, Probe Sequence
ttgcaagccgctcaggacaagctgc

SEQ ID NO: 317817 - DNA, 25 bp, Probe Sequence
ttgcaaggatgcaacggaagagtcc

SEQ ID NO: 317818 - DNA, 25 bp, Probe Sequence
ttgcaagagcgaacagtgacaggga

SEQ ID NO: 317819 - DNA, 25 bp, Probe Sequence
ttgaatgccgcaacctggaggaaaa

SEQ ID NO: 317820 - DNA, 25 bp, Probe Sequence
ttgatatgcttaaccggagatacct

SEQ ID NO: 317821 - DNA, 25 bp, Probe Sequence
ttgattttaaagcaacaggcctttc

SEQ ID NO: 317822 - DNA, 25 bp, Probe Sequence
ttgcctttataaaaacttgctgcct

SEQ ID NO: 317823 - DNA, 25 bp, Probe Sequence
ttgtctgctaaataaacatgtgccc

SEQ ID NO: 317824 - DNA, 25 bp, Probe Sequence
ttgtatctagcctaaagtttcccta

SEQ ID NO: 317825 - DNA, 25 bp, Probe Sequence
ttgtatctagcctaaagtttcccta

SEQ ID NO: 317826 - DNA, 25 bp, Probe Sequence
ttgtatcacctagaaatttcccttt

SEQ ID NO: 317827 - DNA, 25 bp, Probe Sequence
ttgaatatctctctaattttcctct

SEQ ID NO: 317828 - DNA, 25 bp, Probe Sequence
ttgaaactggaactatattatactt

SEQ ID NO: 317829 - DNA, 25 bp, Probe Sequence
ttgaagcttcgagttagtgtatatc

SEQ ID NO: 317830 - DNA, 25 bp, Probe Sequence
ttgaagtgtccttgtagatagactg

SEQ ID NO: 317831 - DNA, 25 bp, Probe Sequence
ttgcatagtcggcactcagtaaatg

SEQ ID NO: 317832 - DNA, 25 bp, Probe Sequence
ttgctggtcctgcacatgagtggaa

SEQ ID NO: 317833 - DNA, 25 bp, Probe Sequence
ttgcctgctccaacaagattggacg

SEQ ID NO: 317834 - DNA, 25 bp, Probe Sequence
ttgccttagcaatagattagtcaga

SEQ ID NO: 317835 - DNA, 25 bp, Probe Sequence
ttccttctatgctaagtgtactcaa

SEQ ID NO: 317836 - DNA, 25 bp, Probe Sequence
ttccaatcttgctttgtgtatctca

SEQ ID NO: 317837 - DNA, 25 bp, Probe Sequence
ttccaagttctccggatattcacaa

SEQ ID NO: 317838 - DNA, 25 bp, Probe Sequence
ttgccaagccttgctagtcattaac

SEQ ID NO: 317839 - DNA, 25 bp, Probe Sequence
ttgccaacgttactgcctttattta

SEQ ID NO: 317840 - DNA, 25 bp, Probe Sequence
ttccaacagatgtaccttttgcaat

SEQ ID NO: 317841 - DNA, 25 bp, Probe Sequence
ttccaaagatcccctctgtagagat

SEQ ID NO: 317842 - DNA, 25 bp, Probe Sequence
ttccaaattcattatctctgtagga

SEQ ID NO: 317843 - DNA, 25 bp, Probe Sequence
ttccaaattctttactgtccaattt

SEQ ID NO: 317844 - DNA, 25 bp, Probe Sequence
ttccatcattttgctacagtccaaa

SEQ ID NO: 317845 - DNA, 25 bp, Probe Sequence
ttcctttgctctggatacaccgaat

SEQ ID NO: 317846 - DNA, 25 bp, Probe Sequence
ttccagtctgtggagtccccagaga

SEQ ID NO: 317847 - DNA, 25 bp, Probe Sequence
ttgccagctctgtgacccaagagtg

SEQ ID NO: 317848 - DNA, 25 bp, Probe Sequence
ttgctctgctctttagccaaggagt

SEQ ID NO: 317849 - DNA, 25 bp, Probe Sequence
ttgctctgctcatctacacatataa

SEQ ID NO: 317850 - DNA, 25 bp, Probe Sequence
ttgctcattgcatccacctgaggaa

SEQ ID NO: 317851 - DNA, 25 bp, Probe Sequence
ttgctttgaaggccccatggaaaca

SEQ ID NO: 317852 - DNA, 25 bp, Probe Sequence
ttgcgttgataaacacacaggtaga

SEQ ID NO: 317853 - DNA, 25 bp, Probe Sequence
ttgctctttaagcctcaaggtcaga

SEQ ID NO: 317854 - DNA, 25 bp, Probe Sequence
ttgttattgatatctcggatacaat

SEQ ID NO: 317855 - DNA, 25 bp, Probe Sequence
ttgttttgatctcccggagctccat

SEQ ID NO: 317856 - DNA, 25 bp, Probe Sequence
ttgtacgttctgtgctggatgctct

SEQ ID NO: 317857 - DNA, 25 bp, Probe Sequence
ttgtagggcctgcccatggagcgga

SEQ ID NO: 317858 - DNA, 25 bp, Probe Sequence
ttgttggagcctgcagggtggtgct

SEQ ID NO: 317859 - DNA, 25 bp, Probe Sequence
ttgtaacctgctgcacggatacatg

SEQ ID NO: 317860 - DNA, 25 bp, Probe Sequence
ttgacaactctggcatacggcccag

SEQ ID NO: 317861 - DNA, 25 bp, Probe Sequence
ttgacccatctggcattgccaacga

SEQ ID NO: 317862 - DNA, 25 bp, Probe Sequence
ttgaccaaccgcagcaatgcacaga

SEQ ID NO: 317863 - DNA, 25 bp, Probe Sequence
ttgcactcaagcctgggcaataaga

SEQ ID NO: 317864 - DNA, 25 bp, Probe Sequence
ttgcattccagccttggcgacagaa

SEQ ID NO: 317865 - DNA, 25 bp, Probe Sequence
ttgctctgcctgtcggtggtcagag

SEQ ID NO: 317866 - DNA, 25 bp, Probe Sequence
ttgctgctgccttgggggatgggaa

SEQ ID NO: 317867 - DNA, 25 bp, Probe Sequence
ttggtgcacgttcgcggagaggaaa

SEQ ID NO: 317868 - DNA, 25 bp, Probe Sequence
ttgcagtgcctcatccaggatggga

SEQ ID NO: 317869 - DNA, 25 bp, Probe Sequence
ttgctgcgtacttccagcagggcga

SEQ ID NO: 317870 - DNA, 25 bp, Probe Sequence
ttgccaagatcttccagggaagatg

SEQ ID NO: 317871 - DNA, 25 bp, Probe Sequence
ttgccaagagcttgaagctcgacgt

SEQ ID NO: 317872 - DNA, 25 bp, Probe Sequence
ttgccagacacatgggctgatacgt

SEQ ID NO: 317873 - DNA, 25 bp, Probe Sequence
ttccaggcactgtgactgtcaagct

SEQ ID NO: 317874 - DNA, 25 bp, Probe Sequence
ttgcacagaagttcgttgtcatagt

SEQ ID NO: 317875 - DNA, 25 bp, Probe Sequence
ttgccagagattgccctgtcaagcc

SEQ ID NO: 317876 - DNA, 25 bp, Probe Sequence
ttgttggttccagctggcaacacgt

SEQ ID NO: 317877 - DNA, 25 bp, Probe Sequence
ttgttgtgttaagctgccaaccttt

SEQ ID NO: 317878 - DNA, 25 bp, Probe Sequence
ttgtttgagtttggtgccaccttat

SEQ ID NO: 317879 - DNA, 25 bp, Probe Sequence
ttgaatgatgagccttcgtgccccc

SEQ ID NO: 317880 - DNA, 25 bp, Probe Sequence
ttgacaatggctctctggccaacac

SEQ ID NO: 317881 - DNA, 25 bp, Probe Sequence
ttgacaatggctctctggccaacac

SEQ ID NO: 317882 - DNA, 25 bp, Probe Sequence
ttgacaatggctctctggccaacac

SEQ ID NO: 317883 - DNA, 25 bp, Probe Sequence
ttgaaagactttgagccacagcccg

SEQ ID NO: 317884 - DNA, 25 bp, Probe Sequence
ttgaccgagtctgcgaggatcgccc

SEQ ID NO: 317885 - DNA, 25 bp, Probe Sequence
ttgaaggacttggcgggacggctgc

SEQ ID NO: 317886 - DNA, 25 bp, Probe Sequence
ttgaacgaaggccggctccggctgg

SEQ ID NO: 317887 - DNA, 25 bp, Probe Sequence
ttgcaggggaggcggctccgagagg

SEQ ID NO: 317888 - DNA, 25 bp, Probe Sequence
ttgcaggggaggcggctccgagagg

SEQ ID NO: 317889 - DNA, 25 bp, Probe Sequence
ttgcaggaaaatctggatccccagg

SEQ ID NO: 317890 - DNA, 25 bp, Probe Sequence
ttgggcagaagacagtcccccagac

SEQ ID NO: 317891 - DNA, 25 bp, Probe Sequence
ttggtgtggaaccattacgcccagg

SEQ ID NO: 317892 - DNA, 25 bp, Probe Sequence
ttggagtcaaagacaaaccccatgg

SEQ ID NO: 317893 - DNA, 25 bp, Probe Sequence
ttggctaaccagccaagatccccgg

SEQ ID NO: 317894 - DNA, 25 bp, Probe Sequence
ttgctctcaacccaggagcatccac

SEQ ID NO: 317895 - DNA, 25 bp, Probe Sequence
ttgcccatgctaagcaggcacacca

SEQ ID NO: 317896 - DNA, 25 bp, Probe Sequence
ttgcccatgctgaagacgcatatta

SEQ ID NO: 317897 - DNA, 25 bp, Probe Sequence
ttgccctgagcaaattgcattttaa

SEQ ID NO: 317898 - DNA, 25 bp, Probe Sequence
ttgcaccgagattttgattcccaaa

SEQ ID NO: 317899 - DNA, 25 bp, Probe Sequence
ttgccagctgtatattatccctaaa

SEQ ID NO: 317900 - DNA, 25 bp, Probe Sequence
ttggctttcatcattatccctacta

SEQ ID NO: 317901 - DNA, 25 bp, Probe Sequence
ttgactttatcattgtttactacta

SEQ ID NO: 317902 - DNA, 25 bp, Probe Sequence
ttgttctttattagctttctcctca

SEQ ID NO: 317903 - DNA, 25 bp, Probe Sequence
ttgtagtatttccgtattcctgctc

SEQ ID NO: 317904 - DNA, 25 bp, Probe Sequence
ttgacagatttagtcgttccacttc

SEQ ID NO: 317905 - DNA, 25 bp, Probe Sequence
ttgaagacgtgattcctgctccaat

SEQ ID NO: 317906 - DNA, 25 bp, Probe Sequence
ttgaatacagcttgctcttgtcacc

SEQ ID NO: 317907 - DNA, 25 bp, Probe Sequence
ttgaagaccatcttgcagtgtgccc

SEQ ID NO: 317908 - DNA, 25 bp, Probe Sequence
ttgaggaccatcttgcctggagcaa

SEQ ID NO: 317909 - DNA, 25 bp, Probe Sequence
ttgacgaccatgactccgtggataa

SEQ ID NO: 317910 - DNA, 25 bp, Probe Sequence
ttgacgaccatgactccgtggataa

SEQ ID NO: 317911 - DNA, 25 bp, Probe Sequence
ttgagagtcaatgtcttcatggtaa

SEQ ID NO: 317912 - DNA, 25 bp, Probe Sequence
ttgcaagatgctcagtccctggtat

SEQ ID NO: 317913 - DNA, 25 bp, Probe Sequence
ttgctagctgctccagtacttgaga

SEQ ID NO: 317914 - DNA, 25 bp, Probe Sequence
ttgatggcgatgacattcagctgga

SEQ ID NO: 317915 - DNA, 25 bp, Probe Sequence
ttgctggtgatggtcttgctggatg

SEQ ID NO: 317916 - DNA, 25 bp, Probe Sequence
ttgctgtgagtgtctctagggtgat

SEQ ID NO: 317917 - DNA, 25 bp, Probe Sequence
ttgcttggggctgagaactgtcaga

SEQ ID NO: 317918 - DNA, 25 bp, Probe Sequence
ttgttgtggacagggaagtgccagt

SEQ ID NO: 317919 - DNA, 25 bp, Probe Sequence
ttgcagttgagaggggagggcagga

SEQ ID NO: 317920 - DNA, 25 bp, Probe Sequence
ttgtgtatcagtgggaatggaaggg

SEQ ID NO: 317921 - DNA, 25 bp, Probe Sequence
ttgagcttcagcggaattcgaaatg

SEQ ID NO: 317922 - DNA, 25 bp, Probe Sequence
ttgacctacgtggcttggaagataa

SEQ ID NO: 317923 - DNA, 25 bp, Probe Sequence
ttgacctacagccaccttgaaaata

SEQ ID NO: 317924 - DNA, 25 bp, Probe Sequence
ttgacccacctaactccagtgaata

SEQ ID NO: 317925 - DNA, 25 bp, Probe Sequence
ttgacaccaaccaatcatactggac

SEQ ID NO: 317926 - DNA, 25 bp, Probe Sequence
ttgacaaaacctaacttgcgcagaa

SEQ ID NO: 317927 - DNA, 25 bp, Probe Sequence
ttgccaaatacatgaagcttcatgc

SEQ ID NO: 317928 - DNA, 25 bp, Probe Sequence
ttgacaaaatcatgaggctcactcc

SEQ ID NO: 317929 - DNA, 25 bp, Probe Sequence
ttgaaagacaaccagtgcacaccca

SEQ ID NO: 317930 - DNA, 25 bp, Probe Sequence
ttgcaaatccaacattgagcttctg

SEQ ID NO: 317931 - DNA, 25 bp, Probe Sequence
ttgcaaagaagggtatgtgtgtatt

SEQ ID NO: 317932 - DNA, 25 bp, Probe Sequence
ttgaaatgaatgcacatagatttat

SEQ ID NO: 317933 - DNA, 25 bp, Probe Sequence
ttgaaaactcacttataatttgcct

SEQ ID NO: 317934 - DNA, 25 bp, Probe Sequence
ttgaagacctggctttagcttccct

SEQ ID NO: 317935 - DNA, 25 bp, Probe Sequence
ttgaagtcttgtctcactggcttcc

SEQ ID NO: 317936 - DNA, 25 bp, Probe Sequence
ttgaaggctttagttctgctttctg

SEQ ID NO: 317937 - DNA, 25 bp, Probe Sequence
ttgaatgtgctgttgaccgtgtctt

SEQ ID NO: 317938 - DNA, 25 bp, Probe Sequence
ttgattggtgttgccagttgtcctc

SEQ ID NO: 317939 - DNA, 25 bp, Probe Sequence
ttgtgggcttggaccacgagccctt

SEQ ID NO: 317940 - DNA, 25 bp, Probe Sequence
ttggcccctggtaagcagaggcttt

SEQ ID NO: 317941 - DNA, 25 bp, Probe Sequence
ttgccccatctgctcaaggatgtgg

SEQ ID NO: 317942 - DNA, 25 bp, Probe Sequence
ttgcccagtgctgccagagtgagtg

SEQ ID NO: 317943 - DNA, 25 bp, Probe Sequence
ttgcccagtgctgccagagtgagtg

SEQ ID NO: 317944 - DNA, 25 bp, Probe Sequence
ttgcccagtgctgccagagtgagtg

SEQ ID NO: 317945 - DNA, 25 bp, Probe Sequence
ttgcccagatgttctcagatatggt

SEQ ID NO: 317946 - DNA, 25 bp, Probe Sequence
ttgctcaatagattgctcaaatcag

SEQ ID NO: 317947 - DNA, 25 bp, Probe Sequence
ttccaatatgattccacccatggca

SEQ ID NO: 317948 - DNA, 25 bp, Probe Sequence
ttccatatatgttataccttgtatg

SEQ ID NO: 317949 - DNA, 25 bp, Probe Sequence
ttccatctatgtttcaatctgtcca

SEQ ID NO: 317950 - DNA, 25 bp, Probe Sequence
ttgtccgcatgttgtaatcgtgcaa

SEQ ID NO: 317951 - DNA, 25 bp, Probe Sequence
ttgagtcttcattgtgaatcttgaa

SEQ ID NO: 317952 - DNA, 25 bp, Probe Sequence
ttgcagtggtctaccatcacggcaa

SEQ ID NO: 317953 - DNA, 25 bp, Probe Sequence
ttgcagtggtctaccatcacggcaa

SEQ ID NO: 317954 - DNA, 25 bp, Probe Sequence
ttgagggatttcatcacgccagacc

SEQ ID NO: 317955 - DNA, 25 bp, Probe Sequence
ttgggggctacaaactggcagttgc

SEQ ID NO: 317956 - DNA, 25 bp, Probe Sequence
ttggcagtgttacaacgtagctccc

SEQ ID NO: 317957 - DNA, 25 bp, Probe Sequence
ttggcagtgtaacatttctagatac

SEQ ID NO: 317958 - DNA, 25 bp, Probe Sequence
ttgtagtgccaacattttagttctt

SEQ ID NO: 317959 - DNA, 25 bp, Probe Sequence
ttgtaatggccaaatttctccttcc

SEQ ID NO: 317960 - DNA, 25 bp, Probe Sequence
ttgatttagccaacatgcctttctt

SEQ ID NO: 317961 - DNA, 25 bp, Probe Sequence
ttgactctccaaaagcctactgtta

SEQ ID NO: 317962 - DNA, 25 bp, Probe Sequence
ttgagtacgccatggcctactctaa

SEQ ID NO: 317963 - DNA, 25 bp, Probe Sequence
ttgagatactgatattgttacatgt

SEQ ID NO: 317964 - DNA, 25 bp, Probe Sequence
ttgaatacttgaatgtgtctcacag

SEQ ID NO: 317965 - DNA, 25 bp, Probe Sequence
ttgatgcagcatttgataatgataa

SEQ ID NO: 317966 - DNA, 25 bp, Probe Sequence
ttgcatatgagctgcagcaataaaa

SEQ ID NO: 317967 - DNA, 25 bp, Probe Sequence
ttgctatggcacccagattaactgt

SEQ ID NO: 317968 - DNA, 25 bp, Probe Sequence
ttgggctcatctccatgattgaccc

SEQ ID NO: 317969 - DNA, 25 bp, Probe Sequence
ttgcggtcgcgcggatcatgatgcc

SEQ ID NO: 317970 - DNA, 25 bp, Probe Sequence
ttgcttctggtgggatcattggcta

SEQ ID NO: 317971 - DNA, 25 bp, Probe Sequence
ttgcctcaggtgcagtctatgatgg

SEQ ID NO: 317972 - DNA, 25 bp, Probe Sequence
ttgtgatcacaagagtctatgcaaa

SEQ ID NO: 317973 - DNA, 25 bp, Probe Sequence
ttgcattccaatttcatgttgatga

SEQ ID NO: 317974 - DNA, 25 bp, Probe Sequence
ttgattctcagttttgctggaggcc

SEQ ID NO: 317975 - DNA, 25 bp, Probe Sequence
ttgaatctcgttctttgtgtcctta

SEQ ID NO: 317976 - DNA, 25 bp, Probe Sequence
ttgaacaacttattctatggcccct

SEQ ID NO: 317977 - DNA, 25 bp, Probe Sequence
ttgccacagactaatggctatgacc

SEQ ID NO: 317978 - DNA, 25 bp, Probe Sequence
ttgcatgggacgaaagcttggctcc

SEQ ID NO: 317979 - DNA, 25 bp, Probe Sequence
ttgctctaacgaaagcactcctgcc

SEQ ID NO: 317980 - DNA, 25 bp, Probe Sequence
ttgtataactatgcagccttccctc

SEQ ID NO: 317981 - DNA, 25 bp, Probe Sequence
ttgtttagtgtctccttcctaaaga

SEQ ID NO: 317982 - DNA, 25 bp, Probe Sequence
ttgctttttcactgtttcctattaa

SEQ ID NO: 317983 - DNA, 25 bp, Probe Sequence
ttgctttttcctctgtatactgcgt

SEQ ID NO: 317984 - DNA, 25 bp, Probe Sequence
ttgtcaaaaagtctgctgtaccgtc

SEQ ID NO: 317985 - DNA, 25 bp, Probe Sequence
ttgtcacccaagaactcttaccatg

SEQ ID NO: 317986 - DNA, 25 bp, Probe Sequence
ttgtttcccatgaagctgattacgc

SEQ ID NO: 317987 - DNA, 25 bp, Probe Sequence
ttgtcttccacaatgagtaaaagct

SEQ ID NO: 317988 - DNA, 25 bp, Probe Sequence
ttgtcacgccaaatgaagagagaaa

SEQ ID NO: 317989 - DNA, 25 bp, Probe Sequence
ttgtgcgcacacttgatgaaggtgt

SEQ ID NO: 317990 - DNA, 25 bp, Probe Sequence
ttgtgcacacacagtaatggaatac

SEQ ID NO: 317991 - DNA, 25 bp, Probe Sequence
ttgctccaccttcatattggctagg

SEQ ID NO: 317992 - DNA, 25 bp, Probe Sequence
ttgggcattctacatactggctaag

SEQ ID NO: 317993 - DNA, 25 bp, Probe Sequence
ttgcgtcttccacaacatattgaac

SEQ ID NO: 317994 - DNA, 25 bp, Probe Sequence
ttgcgactttgataatcatctagaa

SEQ ID NO: 317995 - DNA, 25 bp, Probe Sequence
ttccagccaagatgttcatgtagta

SEQ ID NO: 317996 - DNA, 25 bp, Probe Sequence
ttgtatctctagtcagttcagtagg

SEQ ID NO: 317997 - DNA, 25 bp, Probe Sequence
ttgtgttgtagggttgcaggttttt

SEQ ID NO: 317998 - DNA, 25 bp, Probe Sequence
ttgtgtctggagcctgcaggcaggt

SEQ ID NO: 317999 - DNA, 25 bp, Probe Sequence
ttgcatttagatcacatgagagcaa

SEQ ID NO: 318000 - DNA, 25 bp, Probe Sequence
ttgctttggatggacaatggattct

SEQ ID NO: 318001 - DNA, 25 bp, Probe Sequence
ttgctggatggggacacggtcacat

SEQ ID NO: 318002 - DNA, 25 bp, Probe Sequence
ttgctggagtgtctcccagccaatc

SEQ ID NO: 318003 - DNA, 25 bp, Probe Sequence
ttgatggtgtagctcccaggctata

SEQ ID NO: 318004 - DNA, 25 bp, Probe Sequence
ttggtagggctggcaccagtggaaa

SEQ ID NO: 318005 - DNA, 25 bp, Probe Sequence
ttgtgtaactcgacccagtggtaca

SEQ ID NO: 318006 - DNA, 25 bp, Probe Sequence
ttgttaatctcaactaacgcctaca

SEQ ID NO: 318007 - DNA, 25 bp, Probe Sequence
ttgcttattccagtctgaaaccaaa

SEQ ID NO: 318008 - DNA, 25 bp, Probe Sequence
ttgcttgactctgttattcggaaag

SEQ ID NO: 318009 - DNA, 25 bp, Probe Sequence
ttgcttgaactttattgaggaaaat

SEQ ID NO: 318010 - DNA, 25 bp, Probe Sequence
ttgcttctactttcatcttaaacta

SEQ ID NO: 318011 - DNA, 25 bp, Probe Sequence
ttgcttctactttcatcttaaacta

SEQ ID NO: 318012 - DNA, 25 bp, Probe Sequence
ttgctgtctctttcacctaataaat

SEQ ID NO: 318013 - DNA, 25 bp, Probe Sequence
ttgctctgtgctttcaccttaaagc

SEQ ID NO: 318014 - DNA, 25 bp, Probe Sequence
ttgctctgtgctttcaccttaaagc

SEQ ID NO: 318015 - DNA, 25 bp, Probe Sequence
ttgccttgctgagagccaaacagag

SEQ ID NO: 318016 - DNA, 25 bp, Probe Sequence
ttgcctctgtgattggcccaggagg

SEQ ID NO: 318017 - DNA, 25 bp, Probe Sequence
ttccatgctggatttcttatctgag

SEQ ID NO: 318018 - DNA, 25 bp, Probe Sequence
ttccagccgcattttcacagctgac

SEQ ID NO: 318019 - DNA, 25 bp, Probe Sequence
ttccagatgtcatgtctgccagcca

SEQ ID NO: 318020 - DNA, 25 bp, Probe Sequence
ttgctcatgttattgttgacatgaa

SEQ ID NO: 318021 - DNA, 25 bp, Probe Sequence
ttgcactgctctttgggacagccaa

SEQ ID NO: 318022 - DNA, 25 bp, Probe Sequence
ttgcctccgttgtgtaaaaaaatca

SEQ ID NO: 318023 - DNA, 25 bp, Probe Sequence
ttgcctgcctgtattttaaaaagaa

SEQ ID NO: 318024 - DNA, 25 bp, Probe Sequence
ttgattcctttttttcttatgaaga

SEQ ID NO: 318025 - DNA, 25 bp, Probe Sequence
ttgcccctttattttgctttgctta

SEQ ID NO: 318026 - DNA, 25 bp, Probe Sequence
ttgcccctttattttgctttgctta

SEQ ID NO: 318027 - DNA, 25 bp, Probe Sequence
ttgcactactttttcagtggttctt

SEQ ID NO: 318028 - DNA, 25 bp, Probe Sequence
ttgccttttcaattcctgtgttttg

SEQ ID NO: 318029 - DNA, 25 bp, Probe Sequence
ttgccttgcttttatcacttaattt

SEQ ID NO: 318030 - DNA, 25 bp, Probe Sequence
ttgacattgtccaaacctttttcat

SEQ ID NO: 318031 - DNA, 25 bp, Probe Sequence
ttccacttctcaaaacgttttatat

SEQ ID NO: 318032 - DNA, 25 bp, Probe Sequence
ttgaactgttcaaatgggatgtttg

SEQ ID NO: 318033 - DNA, 25 bp, Probe Sequence
ttgcaactttcaagtgcgttcttta

SEQ ID NO: 318034 - DNA, 25 bp, Probe Sequence
ttgccattctctgcagttttctgtt

SEQ ID NO: 318035 - DNA, 25 bp, Probe Sequence
ttgccttttccagtatgttatgtaa

SEQ ID NO: 318036 - DNA, 25 bp, Probe Sequence
ttgccttttctcttagtaggataac

SEQ ID NO: 318037 - DNA, 25 bp, Probe Sequence
ttgcctttttcactgtgtatggaat

SEQ ID NO: 318038 - DNA, 25 bp, Probe Sequence
ttgccttgctttctggacagctgaa

SEQ ID NO: 318039 - DNA, 25 bp, Probe Sequence
ttgctttctcttctgtgccagaact

SEQ ID NO: 318040 - DNA, 25 bp, Probe Sequence
ttgccttttcaagtgtgacaaactc

SEQ ID NO: 318041 - DNA, 25 bp, Probe Sequence
ttggtttctgagtctgtggaggcac

SEQ ID NO: 318042 - DNA, 25 bp, Probe Sequence
ttgcttaggctctctgtgtgttgaa

SEQ ID NO: 318043 - DNA, 25 bp, Probe Sequence
ttgctttgcctgtgtttgctgatga

SEQ ID NO: 318044 - DNA, 25 bp, Probe Sequence
ttgctttgtgtgtgtcttcctgagc

SEQ ID NO: 318045 - DNA, 25 bp, Probe Sequence
ttgctttgctaatgtgctgatccgc

SEQ ID NO: 318046 - DNA, 25 bp, Probe Sequence
ttgctttgctaatgtgctgatccgc

SEQ ID NO: 318047 - DNA, 25 bp, Probe Sequence
ttgcttatggcatgagggacctctc

SEQ ID NO: 318048 - DNA, 25 bp, Probe Sequence
ttgcttcaggtacgccaggatctgc

SEQ ID NO: 318049 - DNA, 25 bp, Probe Sequence
ttgctgctctttaccaaagaatggt

SEQ ID NO: 318050 - DNA, 25 bp, Probe Sequence
ttgtttttccgcaattgaaggttgt

SEQ ID NO: 318051 - DNA, 25 bp, Probe Sequence
ttgtttttccgcaattgaaggttgt

SEQ ID NO: 318052 - DNA, 25 bp, Probe Sequence
ttgttttacccattcgttatctgtg

SEQ ID NO: 318053 - DNA, 25 bp, Probe Sequence
ttgggttaccgagagcttttgctgg

SEQ ID NO: 318054 - DNA, 25 bp, Probe Sequence
ttggagttactgcagttactgttgg

SEQ ID NO: 318055 - DNA, 25 bp, Probe Sequence
ttgcaggttttttgttacgctgctg

SEQ ID NO: 318056 - DNA, 25 bp, Probe Sequence
ttgcaagtattgagatttgacctga

SEQ ID NO: 318057 - DNA, 25 bp, Probe Sequence
ttgacagtacaaagattccctcgaa

SEQ ID NO: 318058 - DNA, 25 bp, Probe Sequence
ttgagtggaatcctttcctcacgta

SEQ ID NO: 318059 - DNA, 25 bp, Probe Sequence
ttgacgctaatacttgtcaccacct

SEQ ID NO: 318060 - DNA, 25 bp, Probe Sequence
ttgtcactgaggttcttaccagctc

SEQ ID NO: 318061 - DNA, 25 bp, Probe Sequence
ttgcttctggtactttagccacacc

SEQ ID NO: 318062 - DNA, 25 bp, Probe Sequence
ttgccatatggcgagtaccagcccc

SEQ ID NO: 318063 - DNA, 25 bp, Probe Sequence
ttgcctgtgctgggcatacaaccct

SEQ ID NO: 318064 - DNA, 25 bp, Probe Sequence
ttgcacagccctagatacaatccct

SEQ ID NO: 318065 - DNA, 25 bp, Probe Sequence
ttgacacctctgccaacagatgctg

SEQ ID NO: 318066 - DNA, 25 bp, Probe Sequence
ttgaagacattgcaccagatgccat

SEQ ID NO: 318067 - DNA, 25 bp, Probe Sequence
ttgacagagtctcgcactgttgcct

SEQ ID NO: 318068 - DNA, 25 bp, Probe Sequence
ttgtatgcatgtgccacatttcgct

SEQ ID NO: 318069 - DNA, 25 bp, Probe Sequence
ttgaattggtcctatttctcttcct

SEQ ID NO: 318070 - DNA, 25 bp, Probe Sequence
ttggtggacttgcagttctcgtcct

SEQ ID NO: 318071 - DNA, 25 bp, Probe Sequence
ttggtcagcagcatggagttcccgt

SEQ ID NO: 318072 - DNA, 25 bp, Probe Sequence
ttgttcatgtcagtgagagcttccc

SEQ ID NO: 318073 - DNA, 25 bp, Probe Sequence
ttgatcctgccagtagcatatgctt

SEQ ID NO: 318074 - DNA, 25 bp, Probe Sequence
ttgacctcactgcagcaattttcag

SEQ ID NO: 318075 - DNA, 25 bp, Probe Sequence
ttgatgtccttgagctactcttcag

SEQ ID NO: 318076 - DNA, 25 bp, Probe Sequence
ttgattttattcgcaccattgcggt

SEQ ID NO: 318077 - DNA, 25 bp, Probe Sequence
ttgaattatagtacccacacatgca

SEQ ID NO: 318078 - DNA, 25 bp, Probe Sequence
ttgatgctgacaagtccggcaccat

SEQ ID NO: 318079 - DNA, 25 bp, Probe Sequence
ttgtgctgacaacacaggagccaaa

SEQ ID NO: 318080 - DNA, 25 bp, Probe Sequence
ttgactacagtaaagggccagaaac

SEQ ID NO: 318081 - DNA, 25 bp, Probe Sequence
ttgactagatggaccattgtgccag

SEQ ID NO: 318082 - DNA, 25 bp, Probe Sequence
ttgattaatagactccattccagta

SEQ ID NO: 318083 - DNA, 25 bp, Probe Sequence
ttgcgtcaatagctcagtcctgcag

SEQ ID NO: 318084 - DNA, 25 bp, Probe Sequence
ttgcttgaacagcttctcctgagtc

SEQ ID NO: 318085 - DNA, 25 bp, Probe Sequence
ttgctagacaaggttgctgttgtgc

SEQ ID NO: 318086 - DNA, 25 bp, Probe Sequence
ttgtaacaggcttttcggtgctcct

SEQ ID NO: 318087 - DNA, 25 bp, Probe Sequence
ttgttacaggaagtcccttgccatc

SEQ ID NO: 318088 - DNA, 25 bp, Probe Sequence
ttgttacaggaagtcccttgccatc

SEQ ID NO: 318089 - DNA, 25 bp, Probe Sequence
ttgctttagagaatgccactttggc

SEQ ID NO: 318090 - DNA, 25 bp, Probe Sequence
ttgcagttattggagccctgttaca

SEQ ID NO: 318091 - DNA, 25 bp, Probe Sequence
ttgcgcaatattcaccgtatataaa

SEQ ID NO: 318092 - DNA, 25 bp, Probe Sequence
ttgccaatattgccaagtttttata

SEQ ID NO: 318093 - DNA, 25 bp, Probe Sequence
ttgtcacttttcaagtactttctga

SEQ ID NO: 318094 - DNA, 25 bp, Probe Sequence
ttgaacattttccatgtttgttctg

SEQ ID NO: 318095 - DNA, 25 bp, Probe Sequence
ttgacatttgaaccatgttgtttta

SEQ ID NO: 318096 - DNA, 25 bp, Probe Sequence
ttgcagcattcctagtcgttgcttc

SEQ ID NO: 318097 - DNA, 25 bp, Probe Sequence
ttgagggccaagacgattgtttacc

SEQ ID NO: 318098 - DNA, 25 bp, Probe Sequence
ttgagccgccattgaagactccttc

SEQ ID NO: 318099 - DNA, 25 bp, Probe Sequence
ttgaccactgcatgaactgcttcta

SEQ ID NO: 318100 - DNA, 25 bp, Probe Sequence
ttgattcatctctggttttcttgcc

SEQ ID NO: 318101 - DNA, 25 bp, Probe Sequence
ttgtgcttcatctgcgtttggcatc

SEQ ID NO: 318102 - DNA, 25 bp, Probe Sequence
ttgagttgatagtccttctccatct

SEQ ID NO: 318103 - DNA, 25 bp, Probe Sequence
ttgcatgggcataaatttctgccat

SEQ ID NO: 318104 - DNA, 25 bp, Probe Sequence
ttgcatgggcaccacatttcttata

SEQ ID NO: 318105 - DNA, 25 bp, Probe Sequence
ttgagggagcagacggtgcactaca

SEQ ID NO: 318106 - DNA, 25 bp, Probe Sequence
ttgagctagaggccaagtgcactga

SEQ ID NO: 318107 - DNA, 25 bp, Probe Sequence
ttgactcagatggtgcatatgctcc

SEQ ID NO: 318108 - DNA, 25 bp, Probe Sequence
ttgatcaaatgtacatctccccttt

SEQ ID NO: 318109 - DNA, 25 bp, Probe Sequence
ttgtagcactgtcctcagtaccatt

SEQ ID NO: 318110 - DNA, 25 bp, Probe Sequence
ttgccaagtctcccaatatccaatt

SEQ ID NO: 318111 - DNA, 25 bp, Probe Sequence
ttggcaagtctcacatattcatcag

SEQ ID NO: 318112 - DNA, 25 bp, Probe Sequence
ttgctgctacccatctatgtatgta

SEQ ID NO: 318113 - DNA, 25 bp, Probe Sequence
ttgctgctacccatctatgtatgta

SEQ ID NO: 318114 - DNA, 25 bp, Probe Sequence
ttgctgcagactcatcctttttaaa

SEQ ID NO: 318115 - DNA, 25 bp, Probe Sequence
ttgcgaacggattttttatccagaa

SEQ ID NO: 318116 - DNA, 25 bp, Probe Sequence
ttgcaaagtgttgtcttattcctaa

SEQ ID NO: 318117 - DNA, 25 bp, Probe Sequence
ttgaggggttcccctgattcctgaa

SEQ ID NO: 318118 - DNA, 25 bp, Probe Sequence
ttgcagaacagtgccaggtgttcca

SEQ ID NO: 318119 - DNA, 25 bp, Probe Sequence
ttgccagtgcagtcctgggtttcaa

SEQ ID NO: 318120 - DNA, 25 bp, Probe Sequence
ttgccagtacatcaagtgtttcata

SEQ ID NO: 318121 - DNA, 25 bp, Probe Sequence
ttgccagtacatcaatgggcgtgga

SEQ ID NO: 318122 - DNA, 25 bp, Probe Sequence
ttgccagtacatcaatgggcgtgga

SEQ ID NO: 318123 - DNA, 25 bp, Probe Sequence
ttgccagtacatcaatgggcgtgga

SEQ ID NO: 318124 - DNA, 25 bp, Probe Sequence
ttgccagtacatcaatgggcgtgga

SEQ ID NO: 318125 - DNA, 25 bp, Probe Sequence
ttgaagatccccgagatgcagctga

SEQ ID NO: 318126 - DNA, 25 bp, Probe Sequence
ttggactgttgccacagtgcagtga

SEQ ID NO: 318127 - DNA, 25 bp, Probe Sequence
ttgacctgtatgcagctgttggagt

SEQ ID NO: 318128 - DNA, 25 bp, Probe Sequence
ttgcccgatacttgctggagcagac

SEQ ID NO: 318129 - DNA, 25 bp, Probe Sequence
ttgccgcagctgttcatggtgagca

SEQ ID NO: 318130 - DNA, 25 bp, Probe Sequence
ttgctcctgctctcagatcagatca

SEQ ID NO: 318131 - DNA, 25 bp, Probe Sequence
ttgcatgatctgtcaaagtgagata

SEQ ID NO: 318132 - DNA, 25 bp, Probe Sequence
ttgcaatctacttatctaacaaagg

SEQ ID NO: 318133 - DNA, 25 bp, Probe Sequence
ttgcaaacctatacacaaccaagtg

SEQ ID NO: 318134 - DNA, 25 bp, Probe Sequence
ttgcgagtactcaacaccaacatcg

SEQ ID NO: 318135 - DNA, 25 bp, Probe Sequence
ttgctgaagcccaacatggtcaccc

SEQ ID NO: 318136 - DNA, 25 bp, Probe Sequence
ttgctgaagcccaacatggtcaccc

SEQ ID NO: 318137 - DNA, 25 bp, Probe Sequence
ttgctgaagcccaacatggtcaccc

SEQ ID NO: 318138 - DNA, 25 bp, Probe Sequence
ttgctcaacgacatcgtgattctcc

SEQ ID NO: 318139 - DNA, 25 bp, Probe Sequence
ttgctcagggacaaggtgccttcca

SEQ ID NO: 318140 - DNA, 25 bp, Probe Sequence
ttgactggccacagggcacattcgc

SEQ ID NO: 318141 - DNA, 25 bp, Probe Sequence
ttgactcccatgtgggccttgcaaa

SEQ ID NO: 318142 - DNA, 25 bp, Probe Sequence
ttgtcctggcactgtggccaagagg

SEQ ID NO: 318143 - DNA, 25 bp, Probe Sequence
ttgcaactggcctggccgcaacagc

SEQ ID NO: 318144 - DNA, 25 bp, Probe Sequence
ttgcacacgacgtggatcccatcga

SEQ ID NO: 318145 - DNA, 25 bp, Probe Sequence
ttgcacacgacgtggatcccatcga

SEQ ID NO: 318146 - DNA, 25 bp, Probe Sequence
ttgagtctggcgtgaggcgccggaa

SEQ ID NO: 318147 - DNA, 25 bp, Probe Sequence
ttgttgctgtggctgatagccccca

SEQ ID NO: 318148 - DNA, 25 bp, Probe Sequence
ttgttgcagtatggtgcataccacc

SEQ ID NO: 318149 - DNA, 25 bp, Probe Sequence
ttgtctgcatgcaaggagagactca

SEQ ID NO: 318150 - DNA, 25 bp, Probe Sequence
ttgctgctgatccatgaggtcctag

SEQ ID NO: 318151 - DNA, 25 bp, Probe Sequence
ttgctgctgatgctcatcttctcaa

SEQ ID NO: 318152 - DNA, 25 bp, Probe Sequence
ttgctgagctgggcatctatccagc

SEQ ID NO: 318153 - DNA, 25 bp, Probe Sequence
ttgatgatggcacctcagatcgccc

SEQ ID NO: 318154 - DNA, 25 bp, Probe Sequence
ttgcatattagcatcagtcaacccc

SEQ ID NO: 318155 - DNA, 25 bp, Probe Sequence
ttgattgctagcaacttcgtcctca

SEQ ID NO: 318156 - DNA, 25 bp, Probe Sequence
ttgaggctatcaagcttggttctac

SEQ ID NO: 318157 - DNA, 25 bp, Probe Sequence
ttgaggccatgaggtctggcctctt

SEQ ID NO: 318158 - DNA, 25 bp, Probe Sequence
ttgaacagtgctggtctgcacctct

SEQ ID NO: 318159 - DNA, 25 bp, Probe Sequence
ttgacaaatggcaactgacttcttt

SEQ ID NO: 318160 - DNA, 25 bp, Probe Sequence
ttgaaatccaaactactttcttaat

SEQ ID NO: 318161 - DNA, 25 bp, Probe Sequence
ttgaaatcattcttattccctttaa

SEQ ID NO: 318162 - DNA, 25 bp, Probe Sequence
ttgaatatttgcttttactggtgta

SEQ ID NO: 318163 - DNA, 25 bp, Probe Sequence
ttgcacatctttcttggacttggga

SEQ ID NO: 318164 - DNA, 25 bp, Probe Sequence
ttgcacaagtcaccttggactgcag

SEQ ID NO: 318165 - DNA, 25 bp, Probe Sequence
ttgatattgcacctttggacatcgg

SEQ ID NO: 318166 - DNA, 25 bp, Probe Sequence
ttgcttggctatcttggacatacag

SEQ ID NO: 318167 - DNA, 25 bp, Probe Sequence
ttgcttgagcttcagcggaattcga

SEQ ID NO: 318168 - DNA, 25 bp, Probe Sequence
ttgccatgacttcactgaggctgtc

SEQ ID NO: 318169 - DNA, 25 bp, Probe Sequence
ttgccatgacttcactgaggctgtc

SEQ ID NO: 318170 - DNA, 25 bp, Probe Sequence
ttgccatgacttcactgaggctgtc

SEQ ID NO: 318171 - DNA, 25 bp, Probe Sequence
ttgcacatactttactttctgcatg

SEQ ID NO: 318172 - DNA, 25 bp, Probe Sequence
ttgacaactatttgcttttgagtag

SEQ ID NO: 318173 - DNA, 25 bp, Probe Sequence
ttgcatatactattcttgtttgtgt

SEQ ID NO: 318174 - DNA, 25 bp, Probe Sequence
ttgctgtaccttagctgtgtttgct

SEQ ID NO: 318175 - DNA, 25 bp, Probe Sequence
ttgccttcatcaatgtgtctgtttt

SEQ ID NO: 318176 - DNA, 25 bp, Probe Sequence
ttgctgttctgacttggcacattct

SEQ ID NO: 318177 - DNA, 25 bp, Probe Sequence
ttgcagatgtctttagaggctcttg

SEQ ID NO: 318178 - DNA, 25 bp, Probe Sequence
ttgcgctgttgcgtaactggctgtg

SEQ ID NO: 318179 - DNA, 25 bp, Probe Sequence
ttgccttctgccgcagatggctgga

SEQ ID NO: 318180 - DNA, 25 bp, Probe Sequence
ttgcctctgtggagcagttctggag

SEQ ID NO: 318181 - DNA, 25 bp, Probe Sequence
ttgcagctggtgatgcggtactggg

SEQ ID NO: 318182 - DNA, 25 bp, Probe Sequence
ttgagtgcaaatacaggtactgttg

SEQ ID NO: 318183 - DNA, 25 bp, Probe Sequence
ttggagaaatgatgagctacgcctt

SEQ ID NO: 318184 - DNA, 25 bp, Probe Sequence
ttgggaaaggggtcaccgtgtctga

SEQ ID NO: 318185 - DNA, 25 bp, Probe Sequence
ttgagggaagggggcgtctcgtcag

SEQ ID NO: 318186 - DNA, 25 bp, Probe Sequence
ttgtgagaaagttttcgaccctcag

SEQ ID NO: 318187 - DNA, 25 bp, Probe Sequence
ttgggaagtgtagaaagacctgaga

SEQ ID NO: 318188 - DNA, 25 bp, Probe Sequence
ttgggggatgggaaggaacctgaag

SEQ ID NO: 318189 - DNA, 25 bp, Probe Sequence
ttgggggaatgtttggcaacctttg

SEQ ID NO: 318190 - DNA, 25 bp, Probe Sequence
ttgcgcgaggagctcatggggactc

SEQ ID NO: 318191 - DNA, 25 bp, Probe Sequence
ttggtaggagtttgggacgccctgg

SEQ ID NO: 318192 - DNA, 25 bp, Probe Sequence
ttgagccagggttcgggagagccct

SEQ ID NO: 318193 - DNA, 25 bp, Probe Sequence
ttgacaagcttgttggggagttcct

SEQ ID NO: 318194 - DNA, 25 bp, Probe Sequence
ttggtagcctgaagtgggagattgc

SEQ ID NO: 318195 - DNA, 25 bp, Probe Sequence
ttggtacgtcaacaggaacagcaaa

SEQ ID NO: 318196 - DNA, 25 bp, Probe Sequence
ttgccttttgcaaccaggaacagca

SEQ ID NO: 318197 - DNA, 25 bp, Probe Sequence
ttgacttcttgcatgcgagggacca

SEQ ID NO: 318198 - DNA, 25 bp, Probe Sequence
ttgctctttgagttgggatgtacca

SEQ ID NO: 318199 - DNA, 25 bp, Probe Sequence
ttgtctctagagcagggattaacct

SEQ ID NO: 318200 - DNA, 25 bp, Probe Sequence
ttgatctccagacatgcggtgacca

SEQ ID NO: 318201 - DNA, 25 bp, Probe Sequence
ttgagacctacgaggcatgccagca

SEQ ID NO: 318202 - DNA, 25 bp, Probe Sequence
ttggcacagcgagcaggatccacac

SEQ ID NO: 318203 - DNA, 25 bp, Probe Sequence
ttgaccgccaactgacaacatgcta

SEQ ID NO: 318204 - DNA, 25 bp, Probe Sequence
ttgagcccacatattacaacttcag

SEQ ID NO: 318205 - DNA, 25 bp, Probe Sequence
ttgccccaattcttaggatttcttt

SEQ ID NO: 318206 - DNA, 25 bp, Probe Sequence
ttgcccaccattaataagcttagct

SEQ ID NO: 318207 - DNA, 25 bp, Probe Sequence
ttgctccaccaataaacgtttcgat

SEQ ID NO: 318208 - DNA, 25 bp, Probe Sequence
ttgtcccaaaataaatcctttcaga

SEQ ID NO: 318209 - DNA, 25 bp, Probe Sequence
ttgctccccaagtgggcctgattta

SEQ ID NO: 318210 - DNA, 25 bp, Probe Sequence
ttgctcacccaagggggctgcttaa

SEQ ID NO: 318211 - DNA, 25 bp, Probe Sequence
ttgctagaactgtggaagcttctac

SEQ ID NO: 318212 - DNA, 25 bp, Probe Sequence
ttgctacttgagtgtgaacagttac

SEQ ID NO: 318213 - DNA, 25 bp, Probe Sequence
ttgcttcttgtgttttactgtcaga

SEQ ID NO: 318214 - DNA, 25 bp, Probe Sequence
ttgctgctcttggggttgaagtcac

SEQ ID NO: 318215 - DNA, 25 bp, Probe Sequence
ttgcttctgtgatggttatattgcc

SEQ ID NO: 318216 - DNA, 25 bp, Probe Sequence
ttgttctgtggaaggctagcttgcc

SEQ ID NO: 318217 - DNA, 25 bp, Probe Sequence
ttgtcaccggaggtatagctgtgcc

SEQ ID NO: 318218 - DNA, 25 bp, Probe Sequence
ttgaaccaggatctgtcagcgcagc

SEQ ID NO: 318219 - DNA, 25 bp, Probe Sequence
ttgagactcgttactgggcatcagt

SEQ ID NO: 318220 - DNA, 25 bp, Probe Sequence
ttggaactgttgaaatgccaagttt

SEQ ID NO: 318221 - DNA, 25 bp, Probe Sequence
ttggaagcctggacgtgacacgatt

SEQ ID NO: 318222 - DNA, 25 bp, Probe Sequence
ttgtaaactggatcgactctatcat

SEQ ID NO: 318223 - DNA, 25 bp, Probe Sequence
ttgtatccaaggtgctgaatcttgg

SEQ ID NO: 318224 - DNA, 25 bp, Probe Sequence
ttgtatccaaggtgctgaatcttgg

SEQ ID NO: 318225 - DNA, 25 bp, Probe Sequence
ttgattccaatgcaacaaattttag

SEQ ID NO: 318226 - DNA, 25 bp, Probe Sequence
ttgattcagcaagccacaacagtta

SEQ ID NO: 318227 - DNA, 25 bp, Probe Sequence
ttgatctcgagatcccatcacttgt

SEQ ID NO: 318228 - DNA, 25 bp, Probe Sequence
ttgtccaggatggccctgacaagta

SEQ ID NO: 318229 - DNA, 25 bp, Probe Sequence
ttgtaagttgccactgccaacatga

SEQ ID NO: 318230 - DNA, 25 bp, Probe Sequence
ttgaaatgtttccagctgacaagct

SEQ ID NO: 318231 - DNA, 25 bp, Probe Sequence
ttgctatttttctgtgatcacatta

SEQ ID NO: 318232 - DNA, 25 bp, Probe Sequence
ttgcttttttctattgatatttcca

SEQ ID NO: 318233 - DNA, 25 bp, Probe Sequence
ttgctgctttgtgatgacgtgagat

SEQ ID NO: 318234 - DNA, 25 bp, Probe Sequence
ttgcatttctcaattgcatcggaga

SEQ ID NO: 318235 - DNA, 25 bp, Probe Sequence
ttgatatcattcagctgtccaaaaa

SEQ ID NO: 318236 - DNA, 25 bp, Probe Sequence
ttgccacactcatgcttacatagaa

SEQ ID NO: 318237 - DNA, 25 bp, Probe Sequence
ttgcctacctagctgcatctataat

SEQ ID NO: 318238 - DNA, 25 bp, Probe Sequence
ttgccatagcctgcttcttatacaa

SEQ ID NO: 318239 - DNA, 25 bp, Probe Sequence
ttgcctgaggctgtaactgagagaa

SEQ ID NO: 318240 - DNA, 25 bp, Probe Sequence
ttgcgctcggtgcgatactgatgat

SEQ ID NO: 318241 - DNA, 25 bp, Probe Sequence
ttgcttcggcatatgcaaatgattt

SEQ ID NO: 318242 - DNA, 25 bp, Probe Sequence
ttgctctctgagccttgcaaaacct

SEQ ID NO: 318243 - DNA, 25 bp, Probe Sequence
ttgtctcagaggttaaaaacattct

SEQ ID NO: 318244 - DNA, 25 bp, Probe Sequence
ttggccattggtaaaaagacttcat

SEQ ID NO: 318245 - DNA, 25 bp, Probe Sequence
ttggcctttttgattaaattcctgc

SEQ ID NO: 318246 - DNA, 25 bp, Probe Sequence
ttgtctttttagatgcccaaatcct

SEQ ID NO: 318247 - DNA, 25 bp, Probe Sequence
ttgtctttttgcgattggcttagtc

SEQ ID NO: 318248 - DNA, 25 bp, Probe Sequence
ttgtttgtttgtttgggtatcctgc

SEQ ID NO: 318249 - DNA, 25 bp, Probe Sequence
ttgcttctgagatttttggtttcct

SEQ ID NO: 318250 - DNA, 25 bp, Probe Sequence
ttgctagagagtttggggtttggtt

SEQ ID NO: 318251 - DNA, 25 bp, Probe Sequence
ttgagaggagctctggtcgtttggc

SEQ ID NO: 318252 - DNA, 25 bp, Probe Sequence
ttgaggccctgcagttagtttgcgg

SEQ ID NO: 318253 - DNA, 25 bp, Probe Sequence
ttgccagcacctattctgagtttgc

SEQ ID NO: 318254 - DNA, 25 bp, Probe Sequence
ttgcaagacgctgatgctcaagctg

SEQ ID NO: 318255 - DNA, 25 bp, Probe Sequence
ttgaagacgtcattgcccagggtat

SEQ ID NO: 318256 - DNA, 25 bp, Probe Sequence
ttgacgaggtcatgacccggctcat

SEQ ID NO: 318257 - DNA, 25 bp, Probe Sequence
ttgacgaggtcatgacccggctcat

SEQ ID NO: 318258 - DNA, 25 bp, Probe Sequence
ttgactgagcatgttaccaaggctt

SEQ ID NO: 318259 - DNA, 25 bp, Probe Sequence
ttgcacatagcagaggctccgggct

SEQ ID NO: 318260 - DNA, 25 bp, Probe Sequence
ttgatgatagcaacgtgtccctggc

SEQ ID NO: 318261 - DNA, 25 bp, Probe Sequence
ttgagtctccaaggtctccatgtga

SEQ ID NO: 318262 - DNA, 25 bp, Probe Sequence
ttgagacttcattgttcccattaaa

SEQ ID NO: 318263 - DNA, 25 bp, Probe Sequence
ttgtcattggctttttccataaagt

SEQ ID NO: 318264 - DNA, 25 bp, Probe Sequence
ttgtcatcggtattacccatgtgtg

SEQ ID NO: 318265 - DNA, 25 bp, Probe Sequence
ttgacaaagtgtaaaccgcatggat

SEQ ID NO: 318266 - DNA, 25 bp, Probe Sequence
ttgacacaacgtaacaccagcattg

SEQ ID NO: 318267 - DNA, 25 bp, Probe Sequence
ttgactgcacaggtaatacaacacg

SEQ ID NO: 318268 - DNA, 25 bp, Probe Sequence
ttgagtcacaaacttgagcaacaac

SEQ ID NO: 318269 - DNA, 25 bp, Probe Sequence
ttgactccacaactcttgaacatca

SEQ ID NO: 318270 - DNA, 25 bp, Probe Sequence
ttgcacccgaaggattgacaccaac

SEQ ID NO: 318271 - DNA, 25 bp, Probe Sequence
ttgcccacaagagaatgacaccatc

SEQ ID NO: 318272 - DNA, 25 bp, Probe Sequence
ttgcgccctagacaagctaaccagg

SEQ ID NO: 318273 - DNA, 25 bp, Probe Sequence
ttgcgccctcagcgaactaagcaat

SEQ ID NO: 318274 - DNA, 25 bp, Probe Sequence
ttggctactcagtgagcacaaacaa

SEQ ID NO: 318275 - DNA, 25 bp, Probe Sequence
ttggagctccagcctgacatcaaaa

SEQ ID NO: 318276 - DNA, 25 bp, Probe Sequence
ttgggctcacactttacccaagtcg

SEQ ID NO: 318277 - DNA, 25 bp, Probe Sequence
ttggttgcaactactactacaagcc

SEQ ID NO: 318278 - DNA, 25 bp, Probe Sequence
ttgctgtaaatctactactaaaacg

SEQ ID NO: 318279 - DNA, 25 bp, Probe Sequence
ttgtcataaatatcttcctaccaca

SEQ ID NO: 318280 - DNA, 25 bp, Probe Sequence
ttgatctaacaatcctcacaaccct

SEQ ID NO: 318281 - DNA, 25 bp, Probe Sequence
ttgtgctgaacaccaaatcaaccta

SEQ ID NO: 318282 - DNA, 25 bp, Probe Sequence
ttgctgttccaccaaatacaattca

SEQ ID NO: 318283 - DNA, 25 bp, Probe Sequence
ttgcagtaggaggaaatatatttaa

SEQ ID NO: 318284 - DNA, 25 bp, Probe Sequence
ttgcatggcaaaggaattcagtttt

SEQ ID NO: 318285 - DNA, 25 bp, Probe Sequence
ttgaggccatgcttaatatatttat

SEQ ID NO: 318286 - DNA, 25 bp, Probe Sequence
ttgtcgacatcattaatatatattg

SEQ ID NO: 318287 - DNA, 25 bp, Probe Sequence
ttgtaggcatctgtaaattctgttg

SEQ ID NO: 318288 - DNA, 25 bp, Probe Sequence
ttgacggtctatgggatgtttgttt

SEQ ID NO: 318289 - DNA, 25 bp, Probe Sequence
ttgacggttcataaatggctgattt

SEQ ID NO: 318290 - DNA, 25 bp, Probe Sequence
ttgatccgttttcagcagtgctctg

SEQ ID NO: 318291 - DNA, 25 bp, Probe Sequence
ttgatatctaatagtgtacagttgg

SEQ ID NO: 318292 - DNA, 25 bp, Probe Sequence
ttgactgctatatggttcggtaggc

SEQ ID NO: 318293 - DNA, 25 bp, Probe Sequence
ttggagcctaattgttaggtagccc

SEQ ID NO: 318294 - DNA, 25 bp, Probe Sequence
ttggacttgaattatactttagacc

SEQ ID NO: 318295 - DNA, 25 bp, Probe Sequence
ttgaacttgtaaacctttagacact

SEQ ID NO: 318296 - DNA, 25 bp, Probe Sequence
ttgcccatttacacttttgagactt

SEQ ID NO: 318297 - DNA, 25 bp, Probe Sequence
ttgcacctaatacccttttacttgc

SEQ ID NO: 318298 - DNA, 25 bp, Probe Sequence
ttgaatctacattcacttttttttg

SEQ ID NO: 318299 - DNA, 25 bp, Probe Sequence
ttgcaattgtgttacttttattatt

SEQ ID NO: 318300 - DNA, 25 bp, Probe Sequence
ttgcatcaatttttcttatttcatt

SEQ ID NO: 318301 - DNA, 25 bp, Probe Sequence
ttgccgcatacttctttatttgtgt

SEQ ID NO: 318302 - DNA, 25 bp, Probe Sequence
ttgccctgcctctaattatagtggc

SEQ ID NO: 318303 - DNA, 25 bp, Probe Sequence
ttgccttgcctttattacatgtaca

SEQ ID NO: 318304 - DNA, 25 bp, Probe Sequence
ttgccttgcctttattacatgtaca

SEQ ID NO: 318305 - DNA, 25 bp, Probe Sequence
ttgccttcctatatatcagcaataa

SEQ ID NO: 318306 - DNA, 25 bp, Probe Sequence
ttgcctattgtgattatcgctatca

SEQ ID NO: 318307 - DNA, 25 bp, Probe Sequence
ttggtaatggtgttgtggcctcaga

SEQ ID NO: 318308 - DNA, 25 bp, Probe Sequence
ttggattgtggttcgccgcacaagc

SEQ ID NO: 318309 - DNA, 25 bp, Probe Sequence
ttggtatttgcttccaccaacagcc

SEQ ID NO: 318310 - DNA, 25 bp, Probe Sequence
ttggaggtatgatgccaccacagcc

SEQ ID NO: 318311 - DNA, 25 bp, Probe Sequence
ttggtgatggattcgccttgagccc

SEQ ID NO: 318312 - DNA, 25 bp, Probe Sequence
ttgaggtggctggcacctgtagtcc

SEQ ID NO: 318313 - DNA, 25 bp, Probe Sequence
ttgagtgtgggtacttccagtccgc

SEQ ID NO: 318314 - DNA, 25 bp, Probe Sequence
ttgtgtgtttctagttccgtaccac

SEQ ID NO: 318315 - DNA, 25 bp, Probe Sequence
ttgttttctgatgctgttcttacca

SEQ ID NO: 318316 - DNA, 25 bp, Probe Sequence
ttgctactttgagatttatttccac

SEQ ID NO: 318317 - DNA, 25 bp, Probe Sequence
ttgctttcttgaggtctttttcttc

SEQ ID NO: 318318 - DNA, 25 bp, Probe Sequence
ttggtttaatgcctttatttctctt

SEQ ID NO: 318319 - DNA, 25 bp, Probe Sequence
ttgtatgaaacccttttgtcctttg

SEQ ID NO: 318320 - DNA, 25 bp, Probe Sequence
ttgaatgggtccattttgcccttcc

SEQ ID NO: 318321 - DNA, 25 bp, Probe Sequence
ttgaaggatgtcccattactgccct

SEQ ID NO: 318322 - DNA, 25 bp, Probe Sequence
ttgaaagatgtccctttctctctct

SEQ ID NO: 318323 - DNA, 25 bp, Probe Sequence
ttgaaagatgtccctttctctctct

SEQ ID NO: 318324 - DNA, 25 bp, Probe Sequence
ttgaatctgattggacattttcttc

SEQ ID NO: 318325 - DNA, 25 bp, Probe Sequence
ttgtatcttgaggacttcttcgtga

SEQ ID NO: 318326 - DNA, 25 bp, Probe Sequence
ttgtacattgatggacacttaagat

SEQ ID NO: 318327 - DNA, 25 bp, Probe Sequence
ttgtacatctgttacctgatttgaa

SEQ ID NO: 318328 - DNA, 25 bp, Probe Sequence
ttggaatcgatcatgctttcttcaa

SEQ ID NO: 318329 - DNA, 25 bp, Probe Sequence
ttgagatacgtttattgtattcata

SEQ ID NO: 318330 - DNA, 25 bp, Probe Sequence
ttgagtacatgtgtttgtctggtca

SEQ ID NO: 318331 - DNA, 25 bp, Probe Sequence
ttgacatcccatgtttgcctggata

SEQ ID NO: 318332 - DNA, 25 bp, Probe Sequence
ttgtacaagctactttctgctggac

SEQ ID NO: 318333 - DNA, 25 bp, Probe Sequence
ttgtaaacttgtgcttctgtgtcca

SEQ ID NO: 318334 - DNA, 25 bp, Probe Sequence
ttgttaacagattgtttcatgtgtt

SEQ ID NO: 318335 - DNA, 25 bp, Probe Sequence
ttgaagaaactgccattactgtgat

SEQ ID NO: 318336 - DNA, 25 bp, Probe Sequence
ttgacatgaatctatgcgtgaaggt

SEQ ID NO: 318337 - DNA, 25 bp, Probe Sequence
ttgacatactcattgcctactttaa

SEQ ID NO: 318338 - DNA, 25 bp, Probe Sequence
ttgcagatagtcttgccgcatcttg

SEQ ID NO: 318339 - DNA, 25 bp, Probe Sequence
ttgcgatgtgctttgcttgttgctg

SEQ ID NO: 318340 - DNA, 25 bp, Probe Sequence
ttgcgagcacattacttgctgcatg

SEQ ID NO: 318341 - DNA, 25 bp, Probe Sequence
ttgcagagcaacttctgtgccagca

SEQ ID NO: 318342 - DNA, 25 bp, Probe Sequence
ttgctgataccaatatcaccagcat

SEQ ID NO: 318343 - DNA, 25 bp, Probe Sequence
ttgcaataccaaatatacaggttta

SEQ ID NO: 318344 - DNA, 25 bp, Probe Sequence
ttggtagtcaaatacagctgattgt

SEQ ID NO: 318345 - DNA, 25 bp, Probe Sequence
ttgttccttgaagaatgcagcattg

SEQ ID NO: 318346 - DNA, 25 bp, Probe Sequence
ttgtttttaaaagtcacttgctaag

SEQ ID NO: 318347 - DNA, 25 bp, Probe Sequence
ttgttcatttccaaagctacttgtt

SEQ ID NO: 318348 - DNA, 25 bp, Probe Sequence
ttgctttctaccaaacccatagatg

SEQ ID NO: 318349 - DNA, 25 bp, Probe Sequence
ttgcttttagtcaaaccattccata

SEQ ID NO: 318350 - DNA, 25 bp, Probe Sequence
ttgtttaagtatgatccagtggcac

SEQ ID NO: 318351 - DNA, 25 bp, Probe Sequence
ttgtcctaggtacgccaagggcagg

SEQ ID NO: 318352 - DNA, 25 bp, Probe Sequence
ttgtcaaagaattcccaacgccagg

SEQ ID NO: 318353 - DNA, 25 bp, Probe Sequence
ttgctcaaagaaactcagagaactc

SEQ ID NO: 318354 - DNA, 25 bp, Probe Sequence
ttgtaacagccaactctggaagaca

SEQ ID NO: 318355 - DNA, 25 bp, Probe Sequence
ttgtaaatgccacaaatgcatagaa

SEQ ID NO: 318356 - DNA, 25 bp, Probe Sequence
ttgtcaagatccctacattctaaca

SEQ ID NO: 318357 - DNA, 25 bp, Probe Sequence
ttgctcagtatatctatctttaaca

SEQ ID NO: 318358 - DNA, 25 bp, Probe Sequence
ttgacgttactcctctttagacata

SEQ ID NO: 318359 - DNA, 25 bp, Probe Sequence
ttgactcttcaaacagcttttgcag

SEQ ID NO: 318360 - DNA, 25 bp, Probe Sequence
ttgtgctttcatacgcacctttgag

SEQ ID NO: 318361 - DNA, 25 bp, Probe Sequence
ttgtgtcctcaacctgtactatgag

SEQ ID NO: 318362 - DNA, 25 bp, Probe Sequence
ttgtggttgacagcgatactagggc

SEQ ID NO: 318363 - DNA, 25 bp, Probe Sequence
ttgggtctggcagctgaaagcagtg

SEQ ID NO: 318364 - DNA, 25 bp, Probe Sequence
ttgaggccggcttggaacatggtga

SEQ ID NO: 318365 - DNA, 25 bp, Probe Sequence
ttgagaacagtcttgccaacatggc

SEQ ID NO: 318366 - DNA, 25 bp, Probe Sequence
ttgagactagctcgcccaacagagc

SEQ ID NO: 318367 - DNA, 25 bp, Probe Sequence
ttgaactctcttggctgaacagcag

SEQ ID NO: 318368 - DNA, 25 bp, Probe Sequence
ttgctatctctcttccagataacct

SEQ ID NO: 318369 - DNA, 25 bp, Probe Sequence
ttgatacttcttatgttaccatgaa

SEQ ID NO: 318370 - DNA, 25 bp, Probe Sequence
ttgaacttctttaacgagatcatga

SEQ ID NO: 318371 - DNA, 25 bp, Probe Sequence
ttgaagggcctaatgcacgcactaa

SEQ ID NO: 318372 - DNA, 25 bp, Probe Sequence
ttgatgagggactttccctgctcca

SEQ ID NO: 318373 - DNA, 25 bp, Probe Sequence
ttggcaatgagcggttccgctgccc

SEQ ID NO: 318374 - DNA, 25 bp, Probe Sequence
ttggaaagcagggttcctctgcctg

SEQ ID NO: 318375 - DNA, 25 bp, Probe Sequence
ttggtcaatgagcgtttctatcccc

SEQ ID NO: 318376 - DNA, 25 bp, Probe Sequence
ttggtccagagtacttgttttcccg

SEQ ID NO: 318377 - DNA, 25 bp, Probe Sequence
ttggttcattgatattttttccctg

SEQ ID NO: 318378 - DNA, 25 bp, Probe Sequence
ttgcagttgttgaaattgtccccgc

SEQ ID NO: 318379 - DNA, 25 bp, Probe Sequence
ttgcgtatgattcaatcggccaccc

SEQ ID NO: 318380 - DNA, 25 bp, Probe Sequence
ttgcctcatatttaagctgctgctc

SEQ ID NO: 318381 - DNA, 25 bp, Probe Sequence
ttgcccattgtcttattggcacatg

SEQ ID NO: 318382 - DNA, 25 bp, Probe Sequence
ttgactgcttccatgttggcatctg

SEQ ID NO: 318383 - DNA, 25 bp, Probe Sequence
ttgactgcttccatgttggcatctg

SEQ ID NO: 318384 - DNA, 25 bp, Probe Sequence
ttgcactttcagactttgatcacgt

SEQ ID NO: 318385 - DNA, 25 bp, Probe Sequence
ttgacttgctcacctatgaacctat

SEQ ID NO: 318386 - DNA, 25 bp, Probe Sequence
ttgatcaatgctaactatacacctc

SEQ ID NO: 318387 - DNA, 25 bp, Probe Sequence
ttgatttgattccattcactcctca

SEQ ID NO: 318388 - DNA, 25 bp, Probe Sequence
ttgaggactactctcagtcgctgca

SEQ ID NO: 318389 - DNA, 25 bp, Probe Sequence
ttgagaatttctgagcagtgtgtgc

SEQ ID NO: 318390 - DNA, 25 bp, Probe Sequence
ttgaaaaagctgggaattgctgtct

SEQ ID NO: 318391 - DNA, 25 bp, Probe Sequence
ttgaaccaatctacaagtctctgtc

SEQ ID NO: 318392 - DNA, 25 bp, Probe Sequence
ttggaatgaactactggtcttgctc

SEQ ID NO: 318393 - DNA, 25 bp, Probe Sequence
ttggtagaactgaattccttcctcc

SEQ ID NO: 318394 - DNA, 25 bp, Probe Sequence
ttggtaaacctgaccttcatccatc

SEQ ID NO: 318395 - DNA, 25 bp, Probe Sequence
ttgagtcaaagctgttttcccatct

SEQ ID NO: 318396 - DNA, 25 bp, Probe Sequence
ttgttaaagttgtcatttccaatat

SEQ ID NO: 318397 - DNA, 25 bp, Probe Sequence
ttgtaaccaatggaattattcattt

SEQ ID NO: 318398 - DNA, 25 bp, Probe Sequence
ttggaagccaaggccgacttttctg

SEQ ID NO: 318399 - DNA, 25 bp, Probe Sequence
ttgagcaagccaagcatgccagcac

SEQ ID NO: 318400 - DNA, 25 bp, Probe Sequence
ttgcagtgagccaagatcgcaccac

SEQ ID NO: 318401 - DNA, 25 bp, Probe Sequence
ttgcagtgagctgagatcgcaccat

SEQ ID NO: 318402 - DNA, 25 bp, Probe Sequence
ttgcatgtagctatagtcactatat

SEQ ID NO: 318403 - DNA, 25 bp, Probe Sequence
ttgcagcacattaatatgtcttttt

SEQ ID NO: 318404 - DNA, 25 bp, Probe Sequence
ttgctccattcaaatgttccgtcct

SEQ ID NO: 318405 - DNA, 25 bp, Probe Sequence
ttgcccatggataattctcactgat

SEQ ID NO: 318406 - DNA, 25 bp, Probe Sequence
ttgacgcatgaagtttcgcaacatg

SEQ ID NO: 318407 - DNA, 25 bp, Probe Sequence
ttgccgcttttcatcacaagcttga

SEQ ID NO: 318408 - DNA, 25 bp, Probe Sequence
ttggcgtttgtcatcagaatcagag

SEQ ID NO: 318409 - DNA, 25 bp, Probe Sequence
ttggaatttgtgttgcatgtaaggc

SEQ ID NO: 318410 - DNA, 25 bp, Probe Sequence
ttgaggtcgttgtgagagtgaggcc

SEQ ID NO: 318411 - DNA, 25 bp, Probe Sequence
ttgatttctttgtgagggaggctgg

SEQ ID NO: 318412 - DNA, 25 bp, Probe Sequence
ttgacatattttacagggtggagtg

SEQ ID NO: 318413 - DNA, 25 bp, Probe Sequence
ttgtgcctagttaagtgggaatgtg

SEQ ID NO: 318414 - DNA, 25 bp, Probe Sequence
ttggccttttagacttggactgagg

SEQ ID NO: 318415 - DNA, 25 bp, Probe Sequence
ttggaatctacatgtcttgggggcg

SEQ ID NO: 318416 - DNA, 25 bp, Probe Sequence
ttggacctacaatttttgcctatgc

SEQ ID NO: 318417 - DNA, 25 bp, Probe Sequence
ttggacttgacattgtttcccatgg

SEQ ID NO: 318418 - DNA, 25 bp, Probe Sequence
ttgggatgatggaggtactgccagg

SEQ ID NO: 318419 - DNA, 25 bp, Probe Sequence
ttgctggtgttgagtgtcctgttgg

SEQ ID NO: 318420 - DNA, 25 bp, Probe Sequence
ttggaatgatttgggtcagttatcc

SEQ ID NO: 318421 - DNA, 25 bp, Probe Sequence
ttggcagacagtaacgtcagttgat

SEQ ID NO: 318422 - DNA, 25 bp, Probe Sequence
ttgatgaggagttcacggcccagat

SEQ ID NO: 318423 - DNA, 25 bp, Probe Sequence
ttgtgctggaggtaagatgcccact

SEQ ID NO: 318424 - DNA, 25 bp, Probe Sequence
ttggccgaggcatggacatcgagcg

SEQ ID NO: 318425 - DNA, 25 bp, Probe Sequence
ttggcacaacagaattacaccgagt

SEQ ID NO: 318426 - DNA, 25 bp, Probe Sequence
ttgtgcacaggctgtttcccaatgt

SEQ ID NO: 318427 - DNA, 25 bp, Probe Sequence
ttgctgagctggtgtataccggttt

SEQ ID NO: 318428 - DNA, 25 bp, Probe Sequence
ttgcacgctggcctatatatcaggg

SEQ ID NO: 318429 - DNA, 25 bp, Probe Sequence
ttgcagtaggcactttatcaggacc

SEQ ID NO: 318430 - DNA, 25 bp, Probe Sequence
ttgagtcagatgctttcatttacac

SEQ ID NO: 318431 - DNA, 25 bp, Probe Sequence
ttgagtcagatgctttcatttacac

SEQ ID NO: 318432 - DNA, 25 bp, Probe Sequence
ttgagtcaatggattctttggcacc

SEQ ID NO: 318433 - DNA, 25 bp, Probe Sequence
ttgagctaatagatcttttaccact

SEQ ID NO: 318434 - DNA, 25 bp, Probe Sequence
ttgaaaatagtgatgtttccccaga

SEQ ID NO: 318435 - DNA, 25 bp, Probe Sequence
ttgaaatcctgccaattttccccaa

SEQ ID NO: 318436 - DNA, 25 bp, Probe Sequence
ttgaagagcctgagttgcttcccct

SEQ ID NO: 318437 - DNA, 25 bp, Probe Sequence
ttgggagacttttgtcttccagcct

SEQ ID NO: 318438 - DNA, 25 bp, Probe Sequence
ttgggagacttttgtcttccagcct

SEQ ID NO: 318439 - DNA, 25 bp, Probe Sequence
ttgtgggagctgctgttgctgtccc

SEQ ID NO: 318440 - DNA, 25 bp, Probe Sequence
ttgctgggacggattcttgcgggaa

SEQ ID NO: 318441 - DNA, 25 bp, Probe Sequence
ttgatgcggccatggttttggaaga

SEQ ID NO: 318442 - DNA, 25 bp, Probe Sequence
ttgtcaaggagcttatttctggaaa

SEQ ID NO: 318443 - DNA, 25 bp, Probe Sequence
ttgctatgggagttatctttttaga

SEQ ID NO: 318444 - DNA, 25 bp, Probe Sequence
ttgctctgggacttttatgctccca

SEQ ID NO: 318445 - DNA, 25 bp, Probe Sequence
ttgcacttgtcattgtgtttctccc

SEQ ID NO: 318446 - DNA, 25 bp, Probe Sequence
ttgcagctgtacttgttttgctcct

SEQ ID NO: 318447 - DNA, 25 bp, Probe Sequence
ttgcaggtattctcaatttcctttt

SEQ ID NO: 318448 - DNA, 25 bp, Probe Sequence
ttgaggttataaaacatggcctttt

SEQ ID NO: 318449 - DNA, 25 bp, Probe Sequence
ttgtggttatttactcatgtgcctt

SEQ ID NO: 318450 - DNA, 25 bp, Probe Sequence
ttgtgattggctctaccagtgcacc

SEQ ID NO: 318451 - DNA, 25 bp, Probe Sequence
ttgctgttgtgcagtgtgcctgtca

SEQ ID NO: 318452 - DNA, 25 bp, Probe Sequence
ttgctctattgcctggctggaatgc

SEQ ID NO: 318453 - DNA, 25 bp, Probe Sequence
ttgatccatgtccaggtgcaactgt

SEQ ID NO: 318454 - DNA, 25 bp, Probe Sequence
ttgatcgtgactagagatgacctct

SEQ ID NO: 318455 - DNA, 25 bp, Probe Sequence
ttgcatctgtataatggtgaccatt

SEQ ID NO: 318456 - DNA, 25 bp, Probe Sequence
ttgcttgtgtaaggctactatatga

SEQ ID NO: 318457 - DNA, 25 bp, Probe Sequence
ttgatatgataaactctagctctaa

SEQ ID NO: 318458 - DNA, 25 bp, Probe Sequence
ttgacgcataatacctgagccaggc

SEQ ID NO: 318459 - DNA, 25 bp, Probe Sequence
ttgattcatccaaccgagagcagcg

SEQ ID NO: 318460 - DNA, 25 bp, Probe Sequence
ttgcttcatcttttcacaacagctg

SEQ ID NO: 318461 - DNA, 25 bp, Probe Sequence
ttgtagcatttttatcatacagtag

SEQ ID NO: 318462 - DNA, 25 bp, Probe Sequence
ttggagcatttccgattactttgga

SEQ ID NO: 318463 - DNA, 25 bp, Probe Sequence
ttgaagtttagcaatatgacattct

SEQ ID NO: 318464 - DNA, 25 bp, Probe Sequence
ttgaatgtttccatgtacctcactt

SEQ ID NO: 318465 - DNA, 25 bp, Probe Sequence
ttgacatggttctctgaacttatct

SEQ ID NO: 318466 - DNA, 25 bp, Probe Sequence
ttgaaatgtttactgacacttacat

SEQ ID NO: 318467 - DNA, 25 bp, Probe Sequence
ttgaatatcttcaggactttatgct

SEQ ID NO: 318468 - DNA, 25 bp, Probe Sequence
ttgacataactcatggatttggtga

SEQ ID NO: 318469 - DNA, 25 bp, Probe Sequence
ttgaagaagccatgcgctttgcgcg

SEQ ID NO: 318470 - DNA, 25 bp, Probe Sequence
ttgataatagccttgcatgttgtag

SEQ ID NO: 318471 - DNA, 25 bp, Probe Sequence
ttgtaatcccagcattttgagaggc

SEQ ID NO: 318472 - DNA, 25 bp, Probe Sequence
ttgtagtcccagctactcgagaggc

SEQ ID NO: 318473 - DNA, 25 bp, Probe Sequence
ttgaatgtcccagtctattcgggag

SEQ ID NO: 318474 - DNA, 25 bp, Probe Sequence
ttgagtttccgttgtttgccgagta

SEQ ID NO: 318475 - DNA, 25 bp, Probe Sequence
ttgcgtggtccttaggcttacaatg

SEQ ID NO: 318476 - DNA, 25 bp, Probe Sequence
ttgctgtggtctttctactccacaa

SEQ ID NO: 318477 - DNA, 25 bp, Probe Sequence
ttgcgtggctgtttcatgaccgctt

SEQ ID NO: 318478 - DNA, 25 bp, Probe Sequence
ttgcttcctgaagtcatgcacctgt

SEQ ID NO: 318479 - DNA, 25 bp, Probe Sequence
ttgctgttgcaatctatgccgtgta

SEQ ID NO: 318480 - DNA, 25 bp, Probe Sequence
ttgctgttcatctttgatgtctgtt

SEQ ID NO: 318481 - DNA, 25 bp, Probe Sequence
ttgctgattatacttctgagctgct

SEQ ID NO: 318482 - DNA, 25 bp, Probe Sequence
ttggcattaattaccagcctcccac

SEQ ID NO: 318483 - DNA, 25 bp, Probe Sequence
ttgagtgtttttgagccccagacaa

SEQ ID NO: 318484 - DNA, 25 bp, Probe Sequence
ttggtgttgtgagcggcccatgaaa

SEQ ID NO: 318485 - DNA, 25 bp, Probe Sequence
ttgcggtcgtaggtgatgccactgg

SEQ ID NO: 318486 - DNA, 25 bp, Probe Sequence
ttgctggcacggggatgtgccctgc

SEQ ID NO: 318487 - DNA, 25 bp, Probe Sequence
ttgctgtgacagccggtagagcctc

SEQ ID NO: 318488 - DNA, 25 bp, Probe Sequence
ttggatggaggcgtctcagagccag

SEQ ID NO: 318489 - DNA, 25 bp, Probe Sequence
ttggagaagagcttctggcaccaga

SEQ ID NO: 318490 - DNA, 25 bp, Probe Sequence
ttgctggactatttgtggctcctga

SEQ ID NO: 318491 - DNA, 25 bp, Probe Sequence
ttgctggccgcaaggtggtggctga

SEQ ID NO: 318492 - DNA, 25 bp, Probe Sequence
ttgctgtggtgctacgtggaagtga

SEQ ID NO: 318493 - DNA, 25 bp, Probe Sequence
ttgctctgttgctgaggctggagtg

SEQ ID NO: 318494 - DNA, 25 bp, Probe Sequence
ttgctactgaggccaggctgatagg

SEQ ID NO: 318495 - DNA, 25 bp, Probe Sequence
ttgaagctctggccagggatggggt

SEQ ID NO: 318496 - DNA, 25 bp, Probe Sequence
ttgactgacgagccgaggggtggcc

SEQ ID NO: 318497 - DNA, 25 bp, Probe Sequence
ttgacacctcagctgacagcgtggg

SEQ ID NO: 318498 - DNA, 25 bp, Probe Sequence
ttgacaacctgcagtcgggtgaggt

SEQ ID NO: 318499 - DNA, 25 bp, Probe Sequence
ttgacacatctgaccttcgggaagg

SEQ ID NO: 318500 - DNA, 25 bp, Probe Sequence
ttgaccacgtctctgctgtgaatag

SEQ ID NO: 318501 - DNA, 25 bp, Probe Sequence
ttgcaaaccttcaagctgtgtaata

SEQ ID NO: 318502 - DNA, 25 bp, Probe Sequence
ttgatagtcagcattagtggctaaa

SEQ ID NO: 318503 - DNA, 25 bp, Probe Sequence
ttgtagtcagctgagatcgcgccat

SEQ ID NO: 318504 - DNA, 25 bp, Probe Sequence
ttgacgtcatgcggaatgccgcctg

SEQ ID NO: 318505 - DNA, 25 bp, Probe Sequence
ttgaggcagcagggttccacctgaa

SEQ ID NO: 318506 - DNA, 25 bp, Probe Sequence
ttgaggcaatgcttttccctgccaa

SEQ ID NO: 318507 - DNA, 25 bp, Probe Sequence
ttgatggcaatgtatttaatagcga

SEQ ID NO: 318508 - DNA, 25 bp, Probe Sequence
ttgaatcagagccattctaaagtga

SEQ ID NO: 318509 - DNA, 25 bp, Probe Sequence
ttgatgacagaccagtccttgtgga

SEQ ID NO: 318510 - DNA, 25 bp, Probe Sequence
ttggccaagtaagcttgtggggcag

SEQ ID NO: 318511 - DNA, 25 bp, Probe Sequence
ttgtctcgaaaagcctgcggtgtgc

SEQ ID NO: 318512 - DNA, 25 bp, Probe Sequence
ttgtcacagtaacgttcattggttc

SEQ ID NO: 318513 - DNA, 25 bp, Probe Sequence
ttgaactgtcactgattcttgcgcc

SEQ ID NO: 318514 - DNA, 25 bp, Probe Sequence
ttgcaagttacttgttctctcacct

SEQ ID NO: 318515 - DNA, 25 bp, Probe Sequence
ttgcaagattccaagttctcacctc

SEQ ID NO: 318516 - DNA, 25 bp, Probe Sequence
ttgtaatgacacagtctccagccac

SEQ ID NO: 318517 - DNA, 25 bp, Probe Sequence
ttgatcaaatccagagctcctgcct

SEQ ID NO: 318518 - DNA, 25 bp, Probe Sequence
ttgacaaaatgactggctcctgact

SEQ ID NO: 318519 - DNA, 25 bp, Probe Sequence
ttgaccatacaatttcatcctcctt

SEQ ID NO: 318520 - DNA, 25 bp, Probe Sequence
ttgcactatattttcgacctctatt

SEQ ID NO: 318521 - DNA, 25 bp, Probe Sequence
ttgaaatatgcttcccacactgtca

SEQ ID NO: 318522 - DNA, 25 bp, Probe Sequence
ttgaacagacattcccagatcattc

SEQ ID NO: 318523 - DNA, 25 bp, Probe Sequence
ttgataaacattctgcaatattttt

SEQ ID NO: 318524 - DNA, 25 bp, Probe Sequence
ttggaaacgtgcatacatttatatt

SEQ ID NO: 318525 - DNA, 25 bp, Probe Sequence
ttgggaagcgatggatcacaaggtt

SEQ ID NO: 318526 - DNA, 25 bp, Probe Sequence
ttgggggcatcaggtcaagctggat

SEQ ID NO: 318527 - DNA, 25 bp, Probe Sequence
ttgtgggccattgtgcagcacatag

SEQ ID NO: 318528 - DNA, 25 bp, Probe Sequence
ttgctgggtcaaccagcctcacagc

SEQ ID NO: 318529 - DNA, 25 bp, Probe Sequence
ttgtagttgcaactcagcttcctga

SEQ ID NO: 318530 - DNA, 25 bp, Probe Sequence
ttgtagaaaagcaactccctcagtc

SEQ ID NO: 318531 - DNA, 25 bp, Probe Sequence
ttgggaattgaggagcccctctgcc

SEQ ID NO: 318532 - DNA, 25 bp, Probe Sequence
ttgctgagaagtggaggccccagga

SEQ ID NO: 318533 - DNA, 25 bp, Probe Sequence
ttggtgaagttgtcccctgggaagg

SEQ ID NO: 318534 - DNA, 25 bp, Probe Sequence
ttggaaggctgttccacactgggga

SEQ ID NO: 318535 - DNA, 25 bp, Probe Sequence
ttgaaggtgtttacgcccgagatga

SEQ ID NO: 318536 - DNA, 25 bp, Probe Sequence
ttgaaggtgctctttctgctacaag

SEQ ID NO: 318537 - DNA, 25 bp, Probe Sequence
ttgacagttgtgcttctctaggagg

SEQ ID NO: 318538 - DNA, 25 bp, Probe Sequence
ttgaagcttgacattttagtttgcc

SEQ ID NO: 318539 - DNA, 25 bp, Probe Sequence
ttgacagtggatatgtattattttt

SEQ ID NO: 318540 - DNA, 25 bp, Probe Sequence
ttgtgcttggtagatttagtgttaa

SEQ ID NO: 318541 - DNA, 25 bp, Probe Sequence
ttgtctgtgttgctgtttaggtaaa

SEQ ID NO: 318542 - DNA, 25 bp, Probe Sequence
ttgtttttgctgtatttagagatta

SEQ ID NO: 318543 - DNA, 25 bp, Probe Sequence
ttgttgtttcatactttaaatttat

SEQ ID NO: 318544 - DNA, 25 bp, Probe Sequence
ttgcttttatagattcttgatttta

SEQ ID NO: 318545 - DNA, 25 bp, Probe Sequence
ttgctctttttgtattttcgtagta

SEQ ID NO: 318546 - DNA, 25 bp, Probe Sequence
ttgctgtttcatctactgttgctgt

SEQ ID NO: 318547 - DNA, 25 bp, Probe Sequence
ttgcattttcatctactcatttaaa

SEQ ID NO: 318548 - DNA, 25 bp, Probe Sequence
ttgcatctgacattttacctaaaaa

SEQ ID NO: 318549 - DNA, 25 bp, Probe Sequence
ttgttgccatcacgttcctacaaaa

SEQ ID NO: 318550 - DNA, 25 bp, Probe Sequence
ttggtggcatgctacttgcctacag

SEQ ID NO: 318551 - DNA, 25 bp, Probe Sequence
ttgtgttcagcctatcatccatcaa

SEQ ID NO: 318552 - DNA, 25 bp, Probe Sequence
ttgctgttagtactccaatgaaggc

SEQ ID NO: 318553 - DNA, 25 bp, Probe Sequence
ttgaggtatgtactgcataggaacc

SEQ ID NO: 318554 - DNA, 25 bp, Probe Sequence
ttgatggctttcttcagagtctacc

SEQ ID NO: 318555 - DNA, 25 bp, Probe Sequence
ttgatgttgcatgctctcagaatta

SEQ ID NO: 318556 - DNA, 25 bp, Probe Sequence
ttgatattgtcacctagcagatatg

SEQ ID NO: 318557 - DNA, 25 bp, Probe Sequence
ttgctttgtcagcttgcaaaggagg

SEQ ID NO: 318558 - DNA, 25 bp, Probe Sequence
ttgagtctgtgctgtttaaggagga

SEQ ID NO: 318559 - DNA, 25 bp, Probe Sequence
ttgactttgttagatgagggaggaa

SEQ ID NO: 318560 - DNA, 25 bp, Probe Sequence
ttgaccgtgtcccgtgcacggaaaa

SEQ ID NO: 318561 - DNA, 25 bp, Probe Sequence
ttgacttgctgtcccctaaggaaat

SEQ ID NO: 318562 - DNA, 25 bp, Probe Sequence
ttgagtgttggtgttaagcatgaaa

SEQ ID NO: 318563 - DNA, 25 bp, Probe Sequence
ttgcagctgtctctgttcaaaggaa

SEQ ID NO: 318564 - DNA, 25 bp, Probe Sequence
ttgacatgctgtattccacgaggca

SEQ ID NO: 318565 - DNA, 25 bp, Probe Sequence
ttgagcaggtacacaactggtcata

SEQ ID NO: 318566 - DNA, 25 bp, Probe Sequence
ttgatgggaacatcagatctcgtga

SEQ ID NO: 318567 - DNA, 25 bp, Probe Sequence
ttggtggcacagtgagaacctgact

SEQ ID NO: 318568 - DNA, 25 bp, Probe Sequence
ttgagattccagtggtgacttcact

SEQ ID NO: 318569 - DNA, 25 bp, Probe Sequence
ttgtgttaaatgctgtacttactac

SEQ ID NO: 318570 - DNA, 25 bp, Probe Sequence
ttgagttgaaagtataacattttac

SEQ ID NO: 318571 - DNA, 25 bp, Probe Sequence
ttgaattaaatcctccagcttttga

SEQ ID NO: 318572 - DNA, 25 bp, Probe Sequence
ttgaccataaccgtacatcttttca

SEQ ID NO: 318573 - DNA, 25 bp, Probe Sequence
ttgacctcaagataacatttttcat

SEQ ID NO: 318574 - DNA, 25 bp, Probe Sequence
ttgacctaatgtaacccttgtatga

SEQ ID NO: 318575 - DNA, 25 bp, Probe Sequence
ttgaagttcagcatcacgcctttat

SEQ ID NO: 318576 - DNA, 25 bp, Probe Sequence
ttgaagttgcagtccatcaccttcc

SEQ ID NO: 318577 - DNA, 25 bp, Probe Sequence
ttgcttgttcagtatctcaagccca

SEQ ID NO: 318578 - DNA, 25 bp, Probe Sequence
ttgtgggtcagatttcagagttcag

SEQ ID NO: 318579 - DNA, 25 bp, Probe Sequence
ttgttgatgcatccgtccaagttca

SEQ ID NO: 318580 - DNA, 25 bp, Probe Sequence
ttgtgctacatgacgacaaagctgc

SEQ ID NO: 318581 - DNA, 25 bp, Probe Sequence
ttgatgtactggagcaatcagatca

SEQ ID NO: 318582 - DNA, 25 bp, Probe Sequence
ttgagcccggatacttctgaagaac

SEQ ID NO: 318583 - DNA, 25 bp, Probe Sequence
ttgaccgcgatgatgtggctttgaa

SEQ ID NO: 318584 - DNA, 25 bp, Probe Sequence
ttgatcacctgagttgggattttga

SEQ ID NO: 318585 - DNA, 25 bp, Probe Sequence
ttgaacgtgagattgcccattgaaa

SEQ ID NO: 318586 - DNA, 25 bp, Probe Sequence
ttgacacttgtgtatggcttatgaa

SEQ ID NO: 318587 - DNA, 25 bp, Probe Sequence
ttgactctagtttgacattgtgaag

SEQ ID NO: 318588 - DNA, 25 bp, Probe Sequence
ttgatctttgtttaactgaacagca

SEQ ID NO: 318589 - DNA, 25 bp, Probe Sequence
ttgacatttctcgtagactacccag

SEQ ID NO: 318590 - DNA, 25 bp, Probe Sequence
ttgtcattttcgtaacagtcgtcga

SEQ ID NO: 318591 - DNA, 25 bp, Probe Sequence
ttgtgtttttagtagagatggggtt

SEQ ID NO: 318592 - DNA, 25 bp, Probe Sequence
ttgtttatttaatagccagaggctc

SEQ ID NO: 318593 - DNA, 25 bp, Probe Sequence
ttgttttctaactcaggagtcagcc

SEQ ID NO: 318594 - DNA, 25 bp, Probe Sequence
ttgttttggcacgcgaaagtcaacg

SEQ ID NO: 318595 - DNA, 25 bp, Probe Sequence
ttgtgtttgctgacaatcaaaaaaa

SEQ ID NO: 318596 - DNA, 25 bp, Probe Sequence
ttgtgtgagttgatttagtaaaatg

SEQ ID NO: 318597 - DNA, 25 bp, Probe Sequence
ttgtagaggtttgtattagaatgat

SEQ ID NO: 318598 - DNA, 25 bp, Probe Sequence
ttgtggatggtgtctcctttactaa

SEQ ID NO: 318599 - DNA, 25 bp, Probe Sequence
ttgatatctggctgtcctttttata

SEQ ID NO: 318600 - DNA, 25 bp, Probe Sequence
ttgtataggcaaaccatttcttaaa

SEQ ID NO: 318601 - DNA, 25 bp, Probe Sequence
ttgtaactggatttatttcttaata

SEQ ID NO: 318602 - DNA, 25 bp, Probe Sequence
ttgtgaaatggttgcttcctcctga

SEQ ID NO: 318603 - DNA, 25 bp, Probe Sequence
ttggaactgcttactatccatccct

SEQ ID NO: 318604 - DNA, 25 bp, Probe Sequence
ttgtgtacgtgttattccaagcctt

SEQ ID NO: 318605 - DNA, 25 bp, Probe Sequence
ttgtatctccgttgattccaagaat

SEQ ID NO: 318606 - DNA, 25 bp, Probe Sequence
ttgtcactcgatgtcattccaaagt

SEQ ID NO: 318607 - DNA, 25 bp, Probe Sequence
ttgtgactctatgtttgctccagac

SEQ ID NO: 318608 - DNA, 25 bp, Probe Sequence
ttgattctcttatttctgtccagca

SEQ ID NO: 318609 - DNA, 25 bp, Probe Sequence
ttgcttcacgtggatgctcagtgcc

SEQ ID NO: 318610 - DNA, 25 bp, Probe Sequence
ttgtgacacgacaccctgatctgaa

SEQ ID NO: 318611 - DNA, 25 bp, Probe Sequence
ttggagccttacctctatgtggcca

SEQ ID NO: 318612 - DNA, 25 bp, Probe Sequence
ttgaactattcactgtcgagatggc

SEQ ID NO: 318613 - DNA, 25 bp, Probe Sequence
ttgatcctgatttggttgaggccca

SEQ ID NO: 318614 - DNA, 25 bp, Probe Sequence
ttgagcctgagttttctcaggtgaa

SEQ ID NO: 318615 - DNA, 25 bp, Probe Sequence
ttgtcctagttgttccatgagtcag

SEQ ID NO: 318616 - DNA, 25 bp, Probe Sequence
ttgtagatactagtccctgtgtcag

SEQ ID NO: 318617 - DNA, 25 bp, Probe Sequence
ttgtcatgaaccatcacctgcagga

SEQ ID NO: 318618 - DNA, 25 bp, Probe Sequence
ttgtcatgaactatatccgtaacct

SEQ ID NO: 318619 - DNA, 25 bp, Probe Sequence
ttgtagaaatatagacctgtgaaaa

SEQ ID NO: 318620 - DNA, 25 bp, Probe Sequence
ttgctttaacatgatccttgccaca

SEQ ID NO: 318621 - DNA, 25 bp, Probe Sequence
ttgcttttagctgcactatgtgccc

SEQ ID NO: 318622 - DNA, 25 bp, Probe Sequence
ttgttgttacgggtattcagccttc

SEQ ID NO: 318623 - DNA, 25 bp, Probe Sequence
ttgttggtaaggaatatctggcgct

SEQ ID NO: 318624 - DNA, 25 bp, Probe Sequence
ttgttctataagataactaggtatt

SEQ ID NO: 318625 - DNA, 25 bp, Probe Sequence
ttgtcttaatataattccaaggctt

SEQ ID NO: 318626 - DNA, 25 bp, Probe Sequence
ttgatcctcaatactgattcacaat

SEQ ID NO: 318627 - DNA, 25 bp, Probe Sequence
ttgtagccatatcctttgcaatgat

SEQ ID NO: 318628 - DNA, 25 bp, Probe Sequence
ttggagcctctttttgcaaataaag

SEQ ID NO: 318629 - DNA, 25 bp, Probe Sequence
ttgacacctctatgtatgacaatga

SEQ ID NO: 318630 - DNA, 25 bp, Probe Sequence
ttgacagtgtcttggttggagatga

SEQ ID NO: 318631 - DNA, 25 bp, Probe Sequence
ttgtgcagcttcgaggacaggaaag

SEQ ID NO: 318632 - DNA, 25 bp, Probe Sequence
ttggcatcatgttgaagcaccgaaa

SEQ ID NO: 318633 - DNA, 25 bp, Probe Sequence
ttggctatcttggacatacagtaat

SEQ ID NO: 318634 - DNA, 25 bp, Probe Sequence
ttgtctcctgcggagctatcagcca

SEQ ID NO: 318635 - DNA, 25 bp, Probe Sequence
ttgtctctctgacgagtctcagatc

SEQ ID NO: 318636 - DNA, 25 bp, Probe Sequence
ttgttctgatgcaagcaggccaggc

SEQ ID NO: 318637 - DNA, 25 bp, Probe Sequence
ttgcttctgattacaggagcactgt

SEQ ID NO: 318638 - DNA, 25 bp, Probe Sequence
ttgctttgtttgtgagagatgtgta

SEQ ID NO: 318639 - DNA, 25 bp, Probe Sequence
ttgctttgttgatctgagccttcta

SEQ ID NO: 318640 - DNA, 25 bp, Probe Sequence
ttgcttatgttgaattccattgcct

SEQ ID NO: 318641 - DNA, 25 bp, Probe Sequence
ttgcaggtgtggaacgcctagctct

SEQ ID NO: 318642 - DNA, 25 bp, Probe Sequence
ttgcatgggggtaccccaatctgaa

SEQ ID NO: 318643 - DNA, 25 bp, Probe Sequence
ttgtgcaggggcaccgacagcttga

SEQ ID NO: 318644 - DNA, 25 bp, Probe Sequence
ttgtcctggtcacccagacacaaag

SEQ ID NO: 318645 - DNA, 25 bp, Probe Sequence
ttgtcctatggacctcaacaccaag

SEQ ID NO: 318646 - DNA, 25 bp, Probe Sequence
ttgtatgtacaacccaacaggcaag

SEQ ID NO: 318647 - DNA, 25 bp, Probe Sequence
ttgttgtactcgccgacggcaaagt

SEQ ID NO: 318648 - DNA, 25 bp, Probe Sequence
ttgttgctatcggggactacaatgg

SEQ ID NO: 318649 - DNA, 25 bp, Probe Sequence
ttgcttgctatctaagtgtttcaaa

SEQ ID NO: 318650 - DNA, 25 bp, Probe Sequence
ttgcatgatgccttacagttttcaa

SEQ ID NO: 318651 - DNA, 25 bp, Probe Sequence
ttgcatgatgccttacagttttcaa

SEQ ID NO: 318652 - DNA, 25 bp, Probe Sequence
ttgcagctcatcttacacttgaaca

SEQ ID NO: 318653 - DNA, 25 bp, Probe Sequence
ttgagctatcattcacatactatac

SEQ ID NO: 318654 - DNA, 25 bp, Probe Sequence
ttgagctctgcattcaggcagctgc

SEQ ID NO: 318655 - DNA, 25 bp, Probe Sequence
ttgactctgcaaaatcatgcttttt

SEQ ID NO: 318656 - DNA, 25 bp, Probe Sequence
ttgacccagctgaacatgtcttcct

SEQ ID NO: 318657 - DNA, 25 bp, Probe Sequence
ttgagctctcggaactgcatgctgc

SEQ ID NO: 318658 - DNA, 25 bp, Probe Sequence
ttgagcttctggactacgctgactc

SEQ ID NO: 318659 - DNA, 25 bp, Probe Sequence
ttgagttctggctgagccacgcact

SEQ ID NO: 318660 - DNA, 25 bp, Probe Sequence
ttgagaccatcctggccaacatggt

SEQ ID NO: 318661 - DNA, 25 bp, Probe Sequence
ttgggccattcttgcttagacagtc

SEQ ID NO: 318662 - DNA, 25 bp, Probe Sequence
ttggtgccattagtggaaacagtca

SEQ ID NO: 318663 - DNA, 25 bp, Probe Sequence
ttgggctcagtcagagattaggaaa

SEQ ID NO: 318664 - DNA, 25 bp, Probe Sequence
ttgggccttgctaaattgattgaat

SEQ ID NO: 318665 - DNA, 25 bp, Probe Sequence
ttgttgcctattcagtgttacagat

SEQ ID NO: 318666 - DNA, 25 bp, Probe Sequence
ttgtcgtgttacagttatacaatga

SEQ ID NO: 318667 - DNA, 25 bp, Probe Sequence
ttgatcgttttctgacttaattagt

SEQ ID NO: 318668 - DNA, 25 bp, Probe Sequence
ttggcgtatccttctacttatttag

SEQ ID NO: 318669 - DNA, 25 bp, Probe Sequence
ttgatcctttcatttacttttgtaa

SEQ ID NO: 318670 - DNA, 25 bp, Probe Sequence
ttgtgattcgctctagacttttgtt

SEQ ID NO: 318671 - DNA, 25 bp, Probe Sequence
ttgtttttgctttgcattttctgat

SEQ ID NO: 318672 - DNA, 25 bp, Probe Sequence
ttgattttgctgtttttgtttgttt

SEQ ID NO: 318673 - DNA, 25 bp, Probe Sequence
ttgattttgctgtttttgtttgttt

SEQ ID NO: 318674 - DNA, 25 bp, Probe Sequence
ttgtatcttggctgtctggttttat

SEQ ID NO: 318675 - DNA, 25 bp, Probe Sequence
ttgtatttggcaactgtgggcaata

SEQ ID NO: 318676 - DNA, 25 bp, Probe Sequence
ttgttttggcaccgagagatcgtac

SEQ ID NO: 318677 - DNA, 25 bp, Probe Sequence
ttgtgtttctaccggagagagaatg

SEQ ID NO: 318678 - DNA, 25 bp, Probe Sequence
ttggatgtatatcagtggagaaaat

SEQ ID NO: 318679 - DNA, 25 bp, Probe Sequence
ttggtctcatctggagtggggaagg

SEQ ID NO: 318680 - DNA, 25 bp, Probe Sequence
ttgggtcattcgtctgtggaaaggg

SEQ ID NO: 318681 - DNA, 25 bp, Probe Sequence
ttgggccttgtgccagttgaagagg

SEQ ID NO: 318682 - DNA, 25 bp, Probe Sequence
ttggggtttccaatgtgtataggtc

SEQ ID NO: 318683 - DNA, 25 bp, Probe Sequence
ttgtgggctttaggggctacagagt

SEQ ID NO: 318684 - DNA, 25 bp, Probe Sequence
ttgtgggctgcaagtgggtctccaa

SEQ ID NO: 318685 - DNA, 25 bp, Probe Sequence
ttgtagggacaggggtcccactatg

SEQ ID NO: 318686 - DNA, 25 bp, Probe Sequence
ttgtagaggtgggaaggcccctctg

SEQ ID NO: 318687 - DNA, 25 bp, Probe Sequence
ttgacgagaacttcaaggccctctt

SEQ ID NO: 318688 - DNA, 25 bp, Probe Sequence
ttgtggagaaccaagagggcctctt

SEQ ID NO: 318689 - DNA, 25 bp, Probe Sequence
ttgtgggagatgcgtagggggtcat

SEQ ID NO: 318690 - DNA, 25 bp, Probe Sequence
ttgtgggtagttaagagtggggtca

SEQ ID NO: 318691 - DNA, 25 bp, Probe Sequence
ttgggtctaggatatggtgggtgga

SEQ ID NO: 318692 - DNA, 25 bp, Probe Sequence
ttgaggtcaatggaaggtgtagagt

SEQ ID NO: 318693 - DNA, 25 bp, Probe Sequence
ttgacgtcaatggtgaagattacgg

SEQ ID NO: 318694 - DNA, 25 bp, Probe Sequence
ttgagctgtacgggaagtctcactg

SEQ ID NO: 318695 - DNA, 25 bp, Probe Sequence
ttgagatgtaccgagacctcttcca

SEQ ID NO: 318696 - DNA, 25 bp, Probe Sequence
ttgagatgtaccgagacctcttcca

SEQ ID NO: 318697 - DNA, 25 bp, Probe Sequence
ttgaagtatatgatgacttcctcca

SEQ ID NO: 318698 - DNA, 25 bp, Probe Sequence
ttgtatgttgtgttgttgtccccag

SEQ ID NO: 318699 - DNA, 25 bp, Probe Sequence
ttgttttgtgtccgtatccagaagg

SEQ ID NO: 318700 - DNA, 25 bp, Probe Sequence
ttgtcttttaaactactcggatgtg

SEQ ID NO: 318701 - DNA, 25 bp, Probe Sequence
ttgtagtttaaaaagtcctggcaga

SEQ ID NO: 318702 - DNA, 25 bp, Probe Sequence
ttgtctgctttagaaatgctgcctg

SEQ ID NO: 318703 - DNA, 25 bp, Probe Sequence
ttgaccgtgtccgaaatgctgagat

SEQ ID NO: 318704 - DNA, 25 bp, Probe Sequence
ttgagccatgtcacacaaactgatg

SEQ ID NO: 318705 - DNA, 25 bp, Probe Sequence
ttgggttcattcaagctcacgatgc

SEQ ID NO: 318706 - DNA, 25 bp, Probe Sequence
ttgcagagcttcacgcactatcgat

SEQ ID NO: 318707 - DNA, 25 bp, Probe Sequence
ttgagagcttctcagactatccacc

SEQ ID NO: 318708 - DNA, 25 bp, Probe Sequence
ttgagagcttctcagactatccacc

SEQ ID NO: 318709 - DNA, 25 bp, Probe Sequence
ttgagagcttctcagactatccacc

SEQ ID NO: 318710 - DNA, 25 bp, Probe Sequence
ttgagagcttctcagactatccacc

SEQ ID NO: 318711 - DNA, 25 bp, Probe Sequence
ttgacagtgcctctgtcacatcacc

SEQ ID NO: 318712 - DNA, 25 bp, Probe Sequence
ttgagctatggtcgtgccactacac

SEQ ID NO: 318713 - DNA, 25 bp, Probe Sequence
ttgagtaattggcccatccatcacc

SEQ ID NO: 318714 - DNA, 25 bp, Probe Sequence
ttgacttattgtccccactaaaaca

SEQ ID NO: 318715 - DNA, 25 bp, Probe Sequence
ttgagctttttccccttgagaaact

SEQ ID NO: 318716 - DNA, 25 bp, Probe Sequence
ttgagctttttccccttgagaaact

SEQ ID NO: 318717 - DNA, 25 bp, Probe Sequence
ttggccttagtccctgggagttact

SEQ ID NO: 318718 - DNA, 25 bp, Probe Sequence
ttgagcccataagcctgggagttcg

SEQ ID NO: 318719 - DNA, 25 bp, Probe Sequence
ttgagtcactggaccttgcggaatt

SEQ ID NO: 318720 - DNA, 25 bp, Probe Sequence
ttgttcacataggcctctgggagtg

SEQ ID NO: 318721 - DNA, 25 bp, Probe Sequence
ttggtagattgggctgcgcgtagtg

SEQ ID NO: 318722 - DNA, 25 bp, Probe Sequence
ttgattcagatcaggtcggctatca

SEQ ID NO: 318723 - DNA, 25 bp, Probe Sequence
ttgtatgaaccgcatggtgcttgca

SEQ ID NO: 318724 - DNA, 25 bp, Probe Sequence
ttgtatgagaccttttgtgtctggc

SEQ ID NO: 318725 - DNA, 25 bp, Probe Sequence
ttgtagactttcacgtcactgtgcc

SEQ ID NO: 318726 - DNA, 25 bp, Probe Sequence
ttgtatcctttgaccaacatcttcc

SEQ ID NO: 318727 - DNA, 25 bp, Probe Sequence
ttgttgtcgttttaacatctccacg

SEQ ID NO: 318728 - DNA, 25 bp, Probe Sequence
ttgtcagtaatttaacatcactaca

SEQ ID NO: 318729 - DNA, 25 bp, Probe Sequence
ttgtcagcgatttacaaatcctaag

SEQ ID NO: 318730 - DNA, 25 bp, Probe Sequence
ttgtgcctggtgtcaacttttaagc

SEQ ID NO: 318731 - DNA, 25 bp, Probe Sequence
ttgcagactgccatcaagttttaga

SEQ ID NO: 318732 - DNA, 25 bp, Probe Sequence
ttggacatgccccaatgcttctata

SEQ ID NO: 318733 - DNA, 25 bp, Probe Sequence
ttgagacatgctactgaatttggag

SEQ ID NO: 318734 - DNA, 25 bp, Probe Sequence
ttgaaatgctcaagacttcattatt

SEQ ID NO: 318735 - DNA, 25 bp, Probe Sequence
ttgatggattcaagttgctaatatt

SEQ ID NO: 318736 - DNA, 25 bp, Probe Sequence
ttgaggctcacaagttgctctttct

SEQ ID NO: 318737 - DNA, 25 bp, Probe Sequence
ttgggccagctaaacatgcttcatc

SEQ ID NO: 318738 - DNA, 25 bp, Probe Sequence
ttgagacccatcagactgcttcatc

SEQ ID NO: 318739 - DNA, 25 bp, Probe Sequence
ttgaatcctcatgctgctgtggttc

SEQ ID NO: 318740 - DNA, 25 bp, Probe Sequence
ttgaccgtatgcttgcttgggtccc

SEQ ID NO: 318741 - DNA, 25 bp, Probe Sequence
ttgaccagcttgtctgtctggtgct

SEQ ID NO: 318742 - DNA, 25 bp, Probe Sequence
ttgcaccccatgctgttgattgcta

SEQ ID NO: 318743 - DNA, 25 bp, Probe Sequence
ttgactcttctgcatgtttctcata

SEQ ID NO: 318744 - DNA, 25 bp, Probe Sequence
ttgactttgctgaaatttgctgatg

SEQ ID NO: 318745 - DNA, 25 bp, Probe Sequence
ttgactactctgctattatggactc

SEQ ID NO: 318746 - DNA, 25 bp, Probe Sequence
ttgatcaacatcttttcttgcctct

SEQ ID NO: 318747 - DNA, 25 bp, Probe Sequence
ttgatagcttgctttattctgcctt

SEQ ID NO: 318748 - DNA, 25 bp, Probe Sequence
ttgtagtatgtcatcattctgctca

SEQ ID NO: 318749 - DNA, 25 bp, Probe Sequence
ttgtcattatgatttcattatcaca

SEQ ID NO: 318750 - DNA, 25 bp, Probe Sequence
ttgatctttcagatctttccataaa

SEQ ID NO: 318751 - DNA, 25 bp, Probe Sequence
ttgatcatgttgctggcttttataa

SEQ ID NO: 318752 - DNA, 25 bp, Probe Sequence
ttgaagctgtgattgacatttttct

SEQ ID NO: 318753 - DNA, 25 bp, Probe Sequence
ttgaggtgggtggcttcttttggaa

SEQ ID NO: 318754 - DNA, 25 bp, Probe Sequence
ttgaggagaagtttcttatttggag

SEQ ID NO: 318755 - DNA, 25 bp, Probe Sequence
ttgagggagagacctttcttccttg

SEQ ID NO: 318756 - DNA, 25 bp, Probe Sequence
ttggcaaggaagatttgattcctct

SEQ ID NO: 318757 - DNA, 25 bp, Probe Sequence
ttggaaggacgttttggcagcctcc

SEQ ID NO: 318758 - DNA, 25 bp, Probe Sequence
ttggaggagttgttgttaggccgtc

SEQ ID NO: 318759 - DNA, 25 bp, Probe Sequence
ttgtcaggagtctgtgctgtgcacc

SEQ ID NO: 318760 - DNA, 25 bp, Probe Sequence
ttggcagggatcttctggatgacct

SEQ ID NO: 318761 - DNA, 25 bp, Probe Sequence
ttgcaatggaaccttggcaggcgtg

SEQ ID NO: 318762 - DNA, 25 bp, Probe Sequence
ttgcaagtacatcaatgggcgtgga

SEQ ID NO: 318763 - DNA, 25 bp, Probe Sequence
ttgaggttcccttgtgagcttgaat

SEQ ID NO: 318764 - DNA, 25 bp, Probe Sequence
ttgtgggggctttggcagctatgga

SEQ ID NO: 318765 - DNA, 25 bp, Probe Sequence
ttgtgggtatggactggatgcagcg

SEQ ID NO: 318766 - DNA, 25 bp, Probe Sequence
ttgtgggataggattggcggctcat

SEQ ID NO: 318767 - DNA, 25 bp, Probe Sequence
ttgggagagtttaaggcacctgctg

SEQ ID NO: 318768 - DNA, 25 bp, Probe Sequence
ttggagagcttcacaaatgcccctc

SEQ ID NO: 318769 - DNA, 25 bp, Probe Sequence
ttgtgacgcccaaggaatgccacct

SEQ ID NO: 318770 - DNA, 25 bp, Probe Sequence
ttggtctgctccatggagggcacgt

SEQ ID NO: 318771 - DNA, 25 bp, Probe Sequence
ttggatcgtccactgggaccaactg

SEQ ID NO: 318772 - DNA, 25 bp, Probe Sequence
ttggtcttcccaagcgaaattgtgg

SEQ ID NO: 318773 - DNA, 25 bp, Probe Sequence
ttggcttatcccgggaagtgctgct

SEQ ID NO: 318774 - DNA, 25 bp, Probe Sequence
ttggggtcacccagaattgcttgaa

SEQ ID NO: 318775 - DNA, 25 bp, Probe Sequence
ttggaggctcaggcacaggaatcgc

SEQ ID NO: 318776 - DNA, 25 bp, Probe Sequence
ttggcatgatgccacgggtgaatgc

SEQ ID NO: 318777 - DNA, 25 bp, Probe Sequence
ttggaatgcaagctggatgcctggg

SEQ ID NO: 318778 - DNA, 25 bp, Probe Sequence
ttggaggcaatgtggtcactgctgc

SEQ ID NO: 318779 - DNA, 25 bp, Probe Sequence
ttgaggcctatgaaggggtgctgca

SEQ ID NO: 318780 - DNA, 25 bp, Probe Sequence
ttgacctggatgccaggcggctggc

SEQ ID NO: 318781 - DNA, 25 bp, Probe Sequence
ttgacctggatggggcaggccacct

SEQ ID NO: 318782 - DNA, 25 bp, Probe Sequence
ttgaacatgtcggggatcgccctca

SEQ ID NO: 318783 - DNA, 25 bp, Probe Sequence
ttgcaacagcttatagacccccagc

SEQ ID NO: 318784 - DNA, 25 bp, Probe Sequence
ttgcagaaggtacagagcctccgaa

SEQ ID NO: 318785 - DNA, 25 bp, Probe Sequence
ttgaaagtgtggagacaggcctgaa

SEQ ID NO: 318786 - DNA, 25 bp, Probe Sequence
ttgaaagctgtggaataaggcccag

SEQ ID NO: 318787 - DNA, 25 bp, Probe Sequence
ttgacaggcagtggacagacaggcc

SEQ ID NO: 318788 - DNA, 25 bp, Probe Sequence
ttgatctcagtgtaacgacatggcc

SEQ ID NO: 318789 - DNA, 25 bp, Probe Sequence
ttgatccaggacatccatagcccga

SEQ ID NO: 318790 - DNA, 25 bp, Probe Sequence
ttgtccggctgcttggaagcctgga

SEQ ID NO: 318791 - DNA, 25 bp, Probe Sequence
ttgtcctggctctgttatgactaat

SEQ ID NO: 318792 - DNA, 25 bp, Probe Sequence
ttggtctggttcatatggtcaaata

SEQ ID NO: 318793 - DNA, 25 bp, Probe Sequence
ttgagttggtccatcatgggcccat

SEQ ID NO: 318794 - DNA, 25 bp, Probe Sequence
ttggaatgtgaccgtctgtccttca

SEQ ID NO: 318795 - DNA, 25 bp, Probe Sequence
ttgagatcttactgcttgtcacttg

SEQ ID NO: 318796 - DNA, 25 bp, Probe Sequence
ttgaacgtagcgcctgtgaactcag

SEQ ID NO: 318797 - DNA, 25 bp, Probe Sequence
ttgacacttagccgctgtctcgccg

SEQ ID NO: 318798 - DNA, 25 bp, Probe Sequence
ttgacctccacggtgatgctgtggc

SEQ ID NO: 318799 - DNA, 25 bp, Probe Sequence
ttgtcccatccgctatgttggctaa

SEQ ID NO: 318800 - DNA, 25 bp, Probe Sequence
ttgggccatgggctttatcctgaca

SEQ ID NO: 318801 - DNA, 25 bp, Probe Sequence
ttgtaccggacactggattcctgga

SEQ ID NO: 318802 - DNA, 25 bp, Probe Sequence
ttgtaactaacactggaccattgga

SEQ ID NO: 318803 - DNA, 25 bp, Probe Sequence
ttgatattcccagcgtaaattggca

SEQ ID NO: 318804 - DNA, 25 bp, Probe Sequence
ttgatgtatccctttgtgaaattag

SEQ ID NO: 318805 - DNA, 25 bp, Probe Sequence
ttgattggcgcctttctcattatta

SEQ ID NO: 318806 - DNA, 25 bp, Probe Sequence
ttgattggcgcctttctcattatta

SEQ ID NO: 318807 - DNA, 25 bp, Probe Sequence
ttgaagcccccattcgtataataat

SEQ ID NO: 318808 - DNA, 25 bp, Probe Sequence
ttgggcacctcctggtatgtgcaca

SEQ ID NO: 318809 - DNA, 25 bp, Probe Sequence
ttgaaaatctccttgatgtttacaa

SEQ ID NO: 318810 - DNA, 25 bp, Probe Sequence
ttgaaacatatctcttatcttacga

SEQ ID NO: 318811 - DNA, 25 bp, Probe Sequence
ttgaaacatatcttcctgttttctg

SEQ ID NO: 318812 - DNA, 25 bp, Probe Sequence
ttgaggaatcctccatgctgttttc

SEQ ID NO: 318813 - DNA, 25 bp, Probe Sequence
ttgtcgcaatcatatactgtttctg

SEQ ID NO: 318814 - DNA, 25 bp, Probe Sequence
ttgttgccatggttactactgcctg

SEQ ID NO: 318815 - DNA, 25 bp, Probe Sequence
ttgttgccatggtaatcctgctcag

SEQ ID NO: 318816 - DNA, 25 bp, Probe Sequence
ttgtctcttgagtttgtcgctcatg

SEQ ID NO: 318817 - DNA, 25 bp, Probe Sequence
ttgtccttctgctattgatcctgaa

SEQ ID NO: 318818 - DNA, 25 bp, Probe Sequence
ttgtcctacagcttagtattgtggt

SEQ ID NO: 318819 - DNA, 25 bp, Probe Sequence
ttgtctacctgctaagtcaagggtt

SEQ ID NO: 318820 - DNA, 25 bp, Probe Sequence
ttgtctacctgctaagtcaagggtt

SEQ ID NO: 318821 - DNA, 25 bp, Probe Sequence
ttgtcgataagaaatgtaagagtgg

SEQ ID NO: 318822 - DNA, 25 bp, Probe Sequence
ttgggataaagcgtgggcaggtggt

SEQ ID NO: 318823 - DNA, 25 bp, Probe Sequence
ttgggaaaggttgagctgttggatt

SEQ ID NO: 318824 - DNA, 25 bp, Probe Sequence
ttggagaaaggttctgttgccctga

SEQ ID NO: 318825 - DNA, 25 bp, Probe Sequence
ttggaacgggcttttggctactatg

SEQ ID NO: 318826 - DNA, 25 bp, Probe Sequence
ttggggggtattttggtactgtgat

SEQ ID NO: 318827 - DNA, 25 bp, Probe Sequence
ttggggggaaagttgagacgtgatt

SEQ ID NO: 318828 - DNA, 25 bp, Probe Sequence
ttgggatgggaattggaggccctaa

SEQ ID NO: 318829 - DNA, 25 bp, Probe Sequence
ttgagttgtgcgtgggggacccaga

SEQ ID NO: 318830 - DNA, 25 bp, Probe Sequence
ttgagtgaggagtgcggggagcttc

SEQ ID NO: 318831 - DNA, 25 bp, Probe Sequence
ttgagaagaagctgtggggcctaaa

SEQ ID NO: 318832 - DNA, 25 bp, Probe Sequence
ttgagaaggctctgctgggtctcca

SEQ ID NO: 318833 - DNA, 25 bp, Probe Sequence
ttggccgagctcctggggagctcct

SEQ ID NO: 318834 - DNA, 25 bp, Probe Sequence
ttggccaggctcttagaagaccagc

SEQ ID NO: 318835 - DNA, 25 bp, Probe Sequence
ttggtggtgctctacaagtaccgct

SEQ ID NO: 318836 - DNA, 25 bp, Probe Sequence
ttgttctggcaaaccagaccctgct

SEQ ID NO: 318837 - DNA, 25 bp, Probe Sequence
ttgttccaaaacttgatctgcctcc

SEQ ID NO: 318838 - DNA, 25 bp, Probe Sequence
ttgttgccaaaaggttgtgctatcc

SEQ ID NO: 318839 - DNA, 25 bp, Probe Sequence
ttgtacctaatctggtgtgctcacc

SEQ ID NO: 318840 - DNA, 25 bp, Probe Sequence
ttggcccagacctggatcatctcag

SEQ ID NO: 318841 - DNA, 25 bp, Probe Sequence
ttgagccgaggcgtttgaatctagc

SEQ ID NO: 318842 - DNA, 25 bp, Probe Sequence
ttgaggccaggagtttgagaccagc

SEQ ID NO: 318843 - DNA, 25 bp, Probe Sequence
ttgtagccaggtatgagaacaccct

SEQ ID NO: 318844 - DNA, 25 bp, Probe Sequence
ttgtgcccagttctatgacatcatc

SEQ ID NO: 318845 - DNA, 25 bp, Probe Sequence
ttgtgccaagtaagtatcatcctca

SEQ ID NO: 318846 - DNA, 25 bp, Probe Sequence
ttgtacaaacatattcatcacttta

SEQ ID NO: 318847 - DNA, 25 bp, Probe Sequence
ttgtcaccatagacactgtttttta

SEQ ID NO: 318848 - DNA, 25 bp, Probe Sequence
ttgtcaccaagaccctacttctaac

SEQ ID NO: 318849 - DNA, 25 bp, Probe Sequence
ttgtcaccaagaccctacttctaac

SEQ ID NO: 318850 - DNA, 25 bp, Probe Sequence
ttgtagccacaaaccaggcgtctca

SEQ ID NO: 318851 - DNA, 25 bp, Probe Sequence
ttgtagcaagcgatccagacttcta

SEQ ID NO: 318852 - DNA, 25 bp, Probe Sequence
ttgtctcaatggatctagaacttca

SEQ ID NO: 318853 - DNA, 25 bp, Probe Sequence
ttggcaagcttgaatctaaattatc

SEQ ID NO: 318854 - DNA, 25 bp, Probe Sequence
ttggaggctggagtaatcagattac

SEQ ID NO: 318855 - DNA, 25 bp, Probe Sequence
ttgagtccaggagtatgatcatgat

SEQ ID NO: 318856 - DNA, 25 bp, Probe Sequence
ttgatctccagggctcaatcagccc

SEQ ID NO: 318857 - DNA, 25 bp, Probe Sequence
ttgagtcaaggggcttcactgcctg

SEQ ID NO: 318858 - DNA, 25 bp, Probe Sequence
ttggtcaaggccattacctgtttcc

SEQ ID NO: 318859 - DNA, 25 bp, Probe Sequence
ttggcatcaggtgtttagtaggttc

SEQ ID NO: 318860 - DNA, 25 bp, Probe Sequence
ttgtgcacaaatgttcatagtaaca

SEQ ID NO: 318861 - DNA, 25 bp, Probe Sequence
ttggcaaaatccccagagccaaggc

SEQ ID NO: 318862 - DNA, 25 bp, Probe Sequence
ttggcaccaatccaggcagatccag

SEQ ID NO: 318863 - DNA, 25 bp, Probe Sequence
ttgtcaccaaggcagcgcatgtatg

SEQ ID NO: 318864 - DNA, 25 bp, Probe Sequence
ttgtcaccaacgcccatgtggtggc

SEQ ID NO: 318865 - DNA, 25 bp, Probe Sequence
ttgtagtgcagagtgccacagtcct

SEQ ID NO: 318866 - DNA, 25 bp, Probe Sequence
ttgaagctgatgggtgccagccctg

SEQ ID NO: 318867 - DNA, 25 bp, Probe Sequence
ttgaagtgtctgacatccacccagg

SEQ ID NO: 318868 - DNA, 25 bp, Probe Sequence
ttgaaggcttacttgatcccagcga

SEQ ID NO: 318869 - DNA, 25 bp, Probe Sequence
ttgtagtgatttttatgccacctga

SEQ ID NO: 318870 - DNA, 25 bp, Probe Sequence
ttgttgtatttattagtgtagcttc

SEQ ID NO: 318871 - DNA, 25 bp, Probe Sequence
ttgtatgttcctatcaggctgattt

SEQ ID NO: 318872 - DNA, 25 bp, Probe Sequence
ttggtttcacgcctcaggcaattag

SEQ ID NO: 318873 - DNA, 25 bp, Probe Sequence
ttggtcattcctgctcagatagtac

SEQ ID NO: 318874 - DNA, 25 bp, Probe Sequence
ttggtatccacgttgattcaagatc

SEQ ID NO: 318875 - DNA, 25 bp, Probe Sequence
ttgtagtccattggtcattcaaact

SEQ ID NO: 318876 - DNA, 25 bp, Probe Sequence
ttggcagatgccattctcattaata

SEQ ID NO: 318877 - DNA, 25 bp, Probe Sequence
ttggcagatgccattctcattaata

SEQ ID NO: 318878 - DNA, 25 bp, Probe Sequence
ttgagcatctggattctgcctaata

SEQ ID NO: 318879 - DNA, 25 bp, Probe Sequence
ttgagactgatgatgtcccatctaa

SEQ ID NO: 318880 - DNA, 25 bp, Probe Sequence
ttggcagtgctggcttggccattaa

SEQ ID NO: 318881 - DNA, 25 bp, Probe Sequence
ttgggatctgtcttggcattaaacc

SEQ ID NO: 318882 - DNA, 25 bp, Probe Sequence
ttggaactgtattagataaaatcac

SEQ ID NO: 318883 - DNA, 25 bp, Probe Sequence
ttgggcttgttttgcaaacactcaa

SEQ ID NO: 318884 - DNA, 25 bp, Probe Sequence
ttggtcttactttgaagcaacacag

SEQ ID NO: 318885 - DNA, 25 bp, Probe Sequence
ttggtagttctcttgggcagaaaca

SEQ ID NO: 318886 - DNA, 25 bp, Probe Sequence
ttgtttgcaattttggggtaagact

SEQ ID NO: 318887 - DNA, 25 bp, Probe Sequence
ttgttgggactttgagggtttcact

SEQ ID NO: 318888 - DNA, 25 bp, Probe Sequence
ttggtaggattttgactggttttgc

SEQ ID NO: 318889 - DNA, 25 bp, Probe Sequence
ttggccatttgtttgactttgtttg

SEQ ID NO: 318890 - DNA, 25 bp, Probe Sequence
ttggcactttgttttcaagatggtg

SEQ ID NO: 318891 - DNA, 25 bp, Probe Sequence
ttggccttgtattttctggatatgc

SEQ ID NO: 318892 - DNA, 25 bp, Probe Sequence
ttggcactcctgattgcttggttga

SEQ ID NO: 318893 - DNA, 25 bp, Probe Sequence
ttggaggccagcgtctgacgttatg

SEQ ID NO: 318894 - DNA, 25 bp, Probe Sequence
ttggggttgctcatgactgggatgt

SEQ ID NO: 318895 - DNA, 25 bp, Probe Sequence
ttgagggctcctatcagctggagaa

SEQ ID NO: 318896 - DNA, 25 bp, Probe Sequence
ttggggtcactgaaccccgagcatg

SEQ ID NO: 318897 - DNA, 25 bp, Probe Sequence
ttgaggagttagaacatcctgggca

SEQ ID NO: 318898 - DNA, 25 bp, Probe Sequence
ttgtgaagttctatctccagggacc

SEQ ID NO: 318899 - DNA, 25 bp, Probe Sequence
ttgttggtatatatccagcagtgga

SEQ ID NO: 318900 - DNA, 25 bp, Probe Sequence
ttgattcttctaattgcccaggtga

SEQ ID NO: 318901 - DNA, 25 bp, Probe Sequence
ttgtcagtgtctattgcaccaggaa

SEQ ID NO: 318902 - DNA, 25 bp, Probe Sequence
ttgtgcatgggctaaaaccaggaaa

SEQ ID NO: 318903 - DNA, 25 bp, Probe Sequence
ttgtgatgacgtcaaacacagtgaa

SEQ ID NO: 318904 - DNA, 25 bp, Probe Sequence
ttgactgcacggcagaggcgcagct

SEQ ID NO: 318905 - DNA, 25 bp, Probe Sequence
ttgagcgatcgacacaagccagcac

SEQ ID NO: 318906 - DNA, 25 bp, Probe Sequence
ttgaggatctcaaagcacagcccaa

SEQ ID NO: 318907 - DNA, 25 bp, Probe Sequence
ttgaggagcgatctcagcagcccta

SEQ ID NO: 318908 - DNA, 25 bp, Probe Sequence
ttgatgacatcgtttcaggccacaa

SEQ ID NO: 318909 - DNA, 25 bp, Probe Sequence
ttgtacatcgaatcaatgcagcaga

SEQ ID NO: 318910 - DNA, 25 bp, Probe Sequence
ttgtcactacaattgcttcaggcac

SEQ ID NO: 318911 - DNA, 25 bp, Probe Sequence
ttgtcaataacatggtgcgagcaca

SEQ ID NO: 318912 - DNA, 25 bp, Probe Sequence
ttgtcagaaaacgagctagaagcac

SEQ ID NO: 318913 - DNA, 25 bp, Probe Sequence
ttgtagtacagagatccagataaga

SEQ ID NO: 318914 - DNA, 25 bp, Probe Sequence
ttgaaatcaaacctgccgcaacaga

SEQ ID NO: 318915 - DNA, 25 bp, Probe Sequence
ttgtgaccaaatgggcctcaaagat

SEQ ID NO: 318916 - DNA, 25 bp, Probe Sequence
ttgggacactgcaggcctcagaaaa

SEQ ID NO: 318917 - DNA, 25 bp, Probe Sequence
ttgtgtagcctatggtaagtacaaa

SEQ ID NO: 318918 - DNA, 25 bp, Probe Sequence
ttgattttttcacgtaagtccacat

SEQ ID NO: 318919 - DNA, 25 bp, Probe Sequence
ttgatttttgacacatacaccccta

SEQ ID NO: 318920 - DNA, 25 bp, Probe Sequence
ttgattttctccactatcactagca

SEQ ID NO: 318921 - DNA, 25 bp, Probe Sequence
ttgttgaatctctatactgtactaa

SEQ ID NO: 318922 - DNA, 25 bp, Probe Sequence
ttgttgaagtcagtattttgtataa

SEQ ID NO: 318923 - DNA, 25 bp, Probe Sequence
ttgtcatgacaaagcatttatttaa

SEQ ID NO: 318924 - DNA, 25 bp, Probe Sequence
ttgtgctgatcgtgctaaattttca

SEQ ID NO: 318925 - DNA, 25 bp, Probe Sequence
ttgtgtgaatgctgtaagtgttgta

SEQ ID NO: 318926 - DNA, 25 bp, Probe Sequence
ttgtgtatttcacaatgtcgtgcta

SEQ ID NO: 318927 - DNA, 25 bp, Probe Sequence
ttggctttaccatatgttgtgtcta

SEQ ID NO: 318928 - DNA, 25 bp, Probe Sequence
ttgtctcgtacctacagatatgtgc

SEQ ID NO: 318929 - DNA, 25 bp, Probe Sequence
ttgtccgacatcttgacgaggctgc

SEQ ID NO: 318930 - DNA, 25 bp, Probe Sequence
ttgtgcctatatttgacaccagctg

SEQ ID NO: 318931 - DNA, 25 bp, Probe Sequence
ttggccatatattttttagcatgca

SEQ ID NO: 318932 - DNA, 25 bp, Probe Sequence
ttgtccatgctgcttttgtagcaga

SEQ ID NO: 318933 - DNA, 25 bp, Probe Sequence
ttgtccatttgcattcggaaaagaa

SEQ ID NO: 318934 - DNA, 25 bp, Probe Sequence
ttgtccagatttgtcgtgttacagt

SEQ ID NO: 318935 - DNA, 25 bp, Probe Sequence
ttgtgaagattagttcatgtttaaa

SEQ ID NO: 318936 - DNA, 25 bp, Probe Sequence
ttgtagacttacattgtttaatatt

SEQ ID NO: 318937 - DNA, 25 bp, Probe Sequence
ttgaaatgttacattgcttttttcc

SEQ ID NO: 318938 - DNA, 25 bp, Probe Sequence
ttgaaagttactgctgctctattat

SEQ ID NO: 318939 - DNA, 25 bp, Probe Sequence
ttgagaaatctagcgcctattgttc

SEQ ID NO: 318940 - DNA, 25 bp, Probe Sequence
ttgaagacctaatcctctgtgtcac

SEQ ID NO: 318941 - DNA, 25 bp, Probe Sequence
ttgtatacttactacctgctgggca

SEQ ID NO: 318942 - DNA, 25 bp, Probe Sequence
ttgtattatgtgacaaccatgcagg

SEQ ID NO: 318943 - DNA, 25 bp, Probe Sequence
ttgatttcgcttaggccagagtgat

SEQ ID NO: 318944 - DNA, 25 bp, Probe Sequence
ttgatttcgtttcatcagagttttt

SEQ ID NO: 318945 - DNA, 25 bp, Probe Sequence
ttgtttgcacttaatatgggttttt

SEQ ID NO: 318946 - DNA, 25 bp, Probe Sequence
ttggttcctggacatttggtattct

SEQ ID NO: 318947 - DNA, 25 bp, Probe Sequence
ttggttttgtgatattcccgtctcc

SEQ ID NO: 318948 - DNA, 25 bp, Probe Sequence
ttgggtttgtctaactccagagtcc

SEQ ID NO: 318949 - DNA, 25 bp, Probe Sequence
ttggtctcctgagtgtacccaggtc

SEQ ID NO: 318950 - DNA, 25 bp, Probe Sequence
ttgatgtccctgatgcttcaaacct

SEQ ID NO: 318951 - DNA, 25 bp, Probe Sequence
ttgatgccggtgaacgtgcaaaaca

SEQ ID NO: 318952 - DNA, 25 bp, Probe Sequence
ttgaggggtcccctctggaatgcac

SEQ ID NO: 318953 - DNA, 25 bp, Probe Sequence
ttgaggggctaccctgggaagctgc

SEQ ID NO: 318954 - DNA, 25 bp, Probe Sequence
ttggggtgtacaccagggtctccca

SEQ ID NO: 318955 - DNA, 25 bp, Probe Sequence
ttggtcttgtacatgcgcagtgtcc

SEQ ID NO: 318956 - DNA, 25 bp, Probe Sequence
ttgggcttgatgtgctgtgaatgtt

SEQ ID NO: 318957 - DNA, 25 bp, Probe Sequence
ttgggcaagagatgcgcttatgtat

SEQ ID NO: 318958 - DNA, 25 bp, Probe Sequence
ttgtggagtacatcccttgttcttc

SEQ ID NO: 318959 - DNA, 25 bp, Probe Sequence
ttgggagaaaggccctgtttccctg

SEQ ID NO: 318960 - DNA, 25 bp, Probe Sequence
ttgggagaaaggccctgtttccctg

SEQ ID NO: 318961 - DNA, 25 bp, Probe Sequence
ttgggggagaggggtttctgccact

SEQ ID NO: 318962 - DNA, 25 bp, Probe Sequence
ttggggggagagtgttctcctgccc

SEQ ID NO: 318963 - DNA, 25 bp, Probe Sequence
ttgggggaggagatgattccttcaa

SEQ ID NO: 318964 - DNA, 25 bp, Probe Sequence
ttggctgtggagcagttaacactga

SEQ ID NO: 318965 - DNA, 25 bp, Probe Sequence
ttgtgcctgttgaacttgaacctaa

SEQ ID NO: 318966 - DNA, 25 bp, Probe Sequence
ttgtgtcagttcatcattaagctaa

SEQ ID NO: 318967 - DNA, 25 bp, Probe Sequence
ttgtgatcagtcatttttatgtaga

SEQ ID NO: 318968 - DNA, 25 bp, Probe Sequence
ttgtgccgtcattctgttttaagct

SEQ ID NO: 318969 - DNA, 25 bp, Probe Sequence
ttggctcgacatttttctatgattt

SEQ ID NO: 318970 - DNA, 25 bp, Probe Sequence
ttgttatacacagctttatgatatc

SEQ ID NO: 318971 - DNA, 25 bp, Probe Sequence
ttgtataactcaggcgtctttgcat

SEQ ID NO: 318972 - DNA, 25 bp, Probe Sequence
ttgtgtacacactgcttgcttagcc

SEQ ID NO: 318973 - DNA, 25 bp, Probe Sequence
ttgatgagacaactggttatctaat

SEQ ID NO: 318974 - DNA, 25 bp, Probe Sequence
ttgagagagccagttgtgtgcatct

SEQ ID NO: 318975 - DNA, 25 bp, Probe Sequence
ttgagatggccactcgggctggcct

SEQ ID NO: 318976 - DNA, 25 bp, Probe Sequence
ttgagatggccactcgggctggcct

SEQ ID NO: 318977 - DNA, 25 bp, Probe Sequence
ttgactgtgccatggagagtagcag

SEQ ID NO: 318978 - DNA, 25 bp, Probe Sequence
ttgtctcagccattccaggttgctg

SEQ ID NO: 318979 - DNA, 25 bp, Probe Sequence
ttggcagcagacaaccagcgtttct

SEQ ID NO: 318980 - DNA, 25 bp, Probe Sequence
ttggcagaacgaacaccacattttg

SEQ ID NO: 318981 - DNA, 25 bp, Probe Sequence
ttggaaaagtaaaccatgtttcatt

SEQ ID NO: 318982 - DNA, 25 bp, Probe Sequence
ttggaaaaaaacttgctgtgtatat

SEQ ID NO: 318983 - DNA, 25 bp, Probe Sequence
ttgaaacttaaactctgtgcttgta

SEQ ID NO: 318984 - DNA, 25 bp, Probe Sequence
ttgtaactcaaaggatggatgcttg

SEQ ID NO: 318985 - DNA, 25 bp, Probe Sequence
ttgtcaactaaaaagcatgcactct

SEQ ID NO: 318986 - DNA, 25 bp, Probe Sequence
ttgtaatataaaatgcactgcccta

SEQ ID NO: 318987 - DNA, 25 bp, Probe Sequence
ttgtgttataattgtaagcccatat

SEQ ID NO: 318988 - DNA, 25 bp, Probe Sequence
ttgagtgcatataatttagacctaa

SEQ ID NO: 318989 - DNA, 25 bp, Probe Sequence
ttgattctatgccatttggacccaa

SEQ ID NO: 318990 - DNA, 25 bp, Probe Sequence
ttgatttccagccatttactccaag

SEQ ID NO: 318991 - DNA, 25 bp, Probe Sequence
ttgacttctaggaatctaccctgca

SEQ ID NO: 318992 - DNA, 25 bp, Probe Sequence
ttggcccacagggcactgaggggca

SEQ ID NO: 318993 - DNA, 25 bp, Probe Sequence
ttgtgtcctatgcgctcatgagcgt

SEQ ID NO: 318994 - DNA, 25 bp, Probe Sequence
ttgatggcatcatgggcctggccta

SEQ ID NO: 318995 - DNA, 25 bp, Probe Sequence
ttgggctctaagctctgtgtctagt

SEQ ID NO: 318996 - DNA, 25 bp, Probe Sequence
ttgaggttcactctttgtgctacaa

SEQ ID NO: 318997 - DNA, 25 bp, Probe Sequence
ttgggttactcctattattatcaag

SEQ ID NO: 318998 - DNA, 25 bp, Probe Sequence
ttgtatgtcatactccacaatttac

SEQ ID NO: 318999 - DNA, 25 bp, Probe Sequence
ttggatgtagagaccgcttcattac

SEQ ID NO: 319000 - DNA, 25 bp, Probe Sequence
ttggtgtagatgcgcgtcatccttc

SEQ ID NO: 319001 - DNA, 25 bp, Probe Sequence
ttgacgtagtgctcgaacgccagca

SEQ ID NO: 319002 - DNA, 25 bp, Probe Sequence
ttgacctcatcctcgagaacacatc

SEQ ID NO: 319003 - DNA, 25 bp, Probe Sequence
ttgacctgactgtggaagaacttcc

SEQ ID NO: 319004 - DNA, 25 bp, Probe Sequence
ttgacctgactgtggaagaacttcc

SEQ ID NO: 319005 - DNA, 25 bp, Probe Sequence
ttgagccctcttggaaagacttctc

SEQ ID NO: 319006 - DNA, 25 bp, Probe Sequence
ttggcggctcattcaaaaatccttc

SEQ ID NO: 319007 - DNA, 25 bp, Probe Sequence
ttgtcctgtatctgtaaacactttt

SEQ ID NO: 319008 - DNA, 25 bp, Probe Sequence
ttgactctgttgagtacatatactg

SEQ ID NO: 319009 - DNA, 25 bp, Probe Sequence
ttgactcgtgtctgtatcatacaag

SEQ ID NO: 319010 - DNA, 25 bp, Probe Sequence
ttgagcccagactggacaacacagt

SEQ ID NO: 319011 - DNA, 25 bp, Probe Sequence
ttgagcccagaagatcaaggctgca

SEQ ID NO: 319012 - DNA, 25 bp, Probe Sequence
ttgagcccaggagatcaaggctgca

SEQ ID NO: 319013 - DNA, 25 bp, Probe Sequence
ttggccaatggaagacactggcaaa

SEQ ID NO: 319014 - DNA, 25 bp, Probe Sequence
ttggccacatggtgaactctgtgtc

SEQ ID NO: 319015 - DNA, 25 bp, Probe Sequence
ttggacactggacacactagttccc

SEQ ID NO: 319016 - DNA, 25 bp, Probe Sequence
ttgagacctggtagaactgactttc

SEQ ID NO: 319017 - DNA, 25 bp, Probe Sequence
ttggactgtgggagactcaccctca

SEQ ID NO: 319018 - DNA, 25 bp, Probe Sequence
ttggactgtgggagactcaccctca

SEQ ID NO: 319019 - DNA, 25 bp, Probe Sequence
ttggccttggctgtgattatcacct

SEQ ID NO: 319020 - DNA, 25 bp, Probe Sequence
ttggtttcagccatagttcaccttc

SEQ ID NO: 319021 - DNA, 25 bp, Probe Sequence
ttgtttgtgtcgatatgttcggctt

SEQ ID NO: 319022 - DNA, 25 bp, Probe Sequence
ttgtcatttgtggtaatgttcgtat

SEQ ID NO: 319023 - DNA, 25 bp, Probe Sequence
ttgtctcgctgtgtaggcataagct

SEQ ID NO: 319024 - DNA, 25 bp, Probe Sequence
ttgatgctcgctgggtaacatactt

SEQ ID NO: 319025 - DNA, 25 bp, Probe Sequence
ttgtgcctgtttgaagctactgctg

SEQ ID NO: 319026 - DNA, 25 bp, Probe Sequence
ttgatccattttcagcagtgctctg

SEQ ID NO: 319027 - DNA, 25 bp, Probe Sequence
ttgatccattttcagcagtgctctg

SEQ ID NO: 319028 - DNA, 25 bp, Probe Sequence
ttgtacattcttgggcaattgcaga

SEQ ID NO: 319029 - DNA, 25 bp, Probe Sequence
ttgtaactctgcgtggactatggac

SEQ ID NO: 319030 - DNA, 25 bp, Probe Sequence
ttgtaagcacacatgtaattgatga

SEQ ID NO: 319031 - DNA, 25 bp, Probe Sequence
ttgtgaatgcacttgataatttaaa

SEQ ID NO: 319032 - DNA, 25 bp, Probe Sequence
ttgtataccagcttaattgttaata

SEQ ID NO: 319033 - DNA, 25 bp, Probe Sequence
ttgtgattcccaggacttttcctca

SEQ ID NO: 319034 - DNA, 25 bp, Probe Sequence
ttgtgttcagcctatacttttccat

SEQ ID NO: 319035 - DNA, 25 bp, Probe Sequence
ttggattgaccaccatcttttcagc

SEQ ID NO: 319036 - DNA, 25 bp, Probe Sequence
ttggatgctaccactgtactgtcgc

SEQ ID NO: 319037 - DNA, 25 bp, Probe Sequence
ttgtgagctagctggctgtccatat

SEQ ID NO: 319038 - DNA, 25 bp, Probe Sequence
ttgtgaatagcatgctgatgaacat

SEQ ID NO: 319039 - DNA, 25 bp, Probe Sequence
ttgagagcatagcagtggcagccac

SEQ ID NO: 319040 - DNA, 25 bp, Probe Sequence
ttgattgcagcagtgtctggcaccc

SEQ ID NO: 319041 - DNA, 25 bp, Probe Sequence
ttgatctgcgttttgtcacttttcg

SEQ ID NO: 319042 - DNA, 25 bp, Probe Sequence
ttgtgctgaggttttagcttttcta

SEQ ID NO: 319043 - DNA, 25 bp, Probe Sequence
ttgttgggttttagatctcttttca

SEQ ID NO: 319044 - DNA, 25 bp, Probe Sequence
ttgagtgggaatatctgctctctgt

SEQ ID NO: 319045 - DNA, 25 bp, Probe Sequence
ttggtgctgtttcttgtgcatctgt

SEQ ID NO: 319046 - DNA, 25 bp, Probe Sequence
ttggcttcaagtttcatgaatctgt

SEQ ID NO: 319047 - DNA, 25 bp, Probe Sequence
ttggctttgtgtgtcatatcctatt

SEQ ID NO: 319048 - DNA, 25 bp, Probe Sequence
ttgacattttgtatcttgccagttt

SEQ ID NO: 319049 - DNA, 25 bp, Probe Sequence
ttggatttttattttggcaattgta

SEQ ID NO: 319050 - DNA, 25 bp, Probe Sequence
ttggttttcttttttgcgtgtggca

SEQ ID NO: 319051 - DNA, 25 bp, Probe Sequence
ttggttttcttttttgcgtgtggca

SEQ ID NO: 319052 - DNA, 25 bp, Probe Sequence
ttggttttcttttttgcgtgtggca

SEQ ID NO: 319053 - DNA, 25 bp, Probe Sequence
ttggttttcttttttgcgtgtggca

SEQ ID NO: 319054 - DNA, 25 bp, Probe Sequence
ttggttttcttttttgcgtgtggca

SEQ ID NO: 319055 - DNA, 25 bp, Probe Sequence
ttggttttcttttttgcgtgtggca

SEQ ID NO: 319056 - DNA, 25 bp, Probe Sequence
ttggttttcttttttgcgtgtggca

SEQ ID NO: 319057 - DNA, 25 bp, Probe Sequence
ttgggtgtttttcttgttgtgtcct

SEQ ID NO: 319058 - DNA, 25 bp, Probe Sequence
ttggaggttgatttgctgttttgtt

SEQ ID NO: 319059 - DNA, 25 bp, Probe Sequence
ttggggcagttacctggttgctgtt

SEQ ID NO: 319060 - DNA, 25 bp, Probe Sequence
ttgtggggtgtaactactagcttta

SEQ ID NO: 319061 - DNA, 25 bp, Probe Sequence
ttgttggcagtgagcattacgatgt

SEQ ID NO: 319062 - DNA, 25 bp, Probe Sequence
ttgtgtggagtgacggaactgcagt

SEQ ID NO: 319063 - DNA, 25 bp, Probe Sequence
ttggtggacatgaaggaactgggca

SEQ ID NO: 319064 - DNA, 25 bp, Probe Sequence
ttgggagatcaggtcgatacggccg

SEQ ID NO: 319065 - DNA, 25 bp, Probe Sequence
ttggggatcagcgggatccggccta

SEQ ID NO: 319066 - DNA, 25 bp, Probe Sequence
ttgagggtgcagtgagccctggtcg

SEQ ID NO: 319067 - DNA, 25 bp, Probe Sequence
ttggttgtggcatgacatctgggtc

SEQ ID NO: 319068 - DNA, 25 bp, Probe Sequence
ttgtgttgtcgatacttgtggagca

SEQ ID NO: 319069 - DNA, 25 bp, Probe Sequence
ttgttcttagtctatctcttgtaca

SEQ ID NO: 319070 - DNA, 25 bp, Probe Sequence
ttgattgcactattatttgttgcta

SEQ ID NO: 319071 - DNA, 25 bp, Probe Sequence
ttgagctcctatttctctgattgta

SEQ ID NO: 319072 - DNA, 25 bp, Probe Sequence
ttgagcccattcttctgggtgtgct

SEQ ID NO: 319073 - DNA, 25 bp, Probe Sequence
ttgggctcagtgctgtaggtctgct

SEQ ID NO: 319074 - DNA, 25 bp, Probe Sequence
ttggagatgcgtcagtcattgccct

SEQ ID NO: 319075 - DNA, 25 bp, Probe Sequence
ttggaggctttagtcattcccagac

SEQ ID NO: 319076 - DNA, 25 bp, Probe Sequence
ttggaggcgtcattttcttccatga

SEQ ID NO: 319077 - DNA, 25 bp, Probe Sequence
ttgtgagggtgtttattctatatga

SEQ ID NO: 319078 - DNA, 25 bp, Probe Sequence
ttgtggggttcgctctactatggag

SEQ ID NO: 319079 - DNA, 25 bp, Probe Sequence
ttgtgggtcttcctatctacaagga

SEQ ID NO: 319080 - DNA, 25 bp, Probe Sequence
ttggtgtggattctgttgaaggaga

SEQ ID NO: 319081 - DNA, 25 bp, Probe Sequence
ttgggggcactgtagattaaatgag

SEQ ID NO: 319082 - DNA, 25 bp, Probe Sequence
ttggtggcagagctaattcaacaga

SEQ ID NO: 319083 - DNA, 25 bp, Probe Sequence
ttgggtgctcagagtttcagcaagc

SEQ ID NO: 319084 - DNA, 25 bp, Probe Sequence
ttggcttctcagatgtatttcaagg

SEQ ID NO: 319085 - DNA, 25 bp, Probe Sequence
ttgtctttcacaaattctgttggtg

SEQ ID NO: 319086 - DNA, 25 bp, Probe Sequence
ttgacttctactttactggctgagt

SEQ ID NO: 319087 - DNA, 25 bp, Probe Sequence
ttgtctcttattaaactggctagtt

SEQ ID NO: 319088 - DNA, 25 bp, Probe Sequence
ttgttttttcaatcatggccatatt

SEQ ID NO: 319089 - DNA, 25 bp, Probe Sequence
ttgttgttgttctagccatgtgaca

SEQ ID NO: 319090 - DNA, 25 bp, Probe Sequence
ttgtttatcttgttgctgcaatgag

SEQ ID NO: 319091 - DNA, 25 bp, Probe Sequence
ttgagttgtttgttgctaagaggta

SEQ ID NO: 319092 - DNA, 25 bp, Probe Sequence
ttgacttcttttgggaaatggtcat

SEQ ID NO: 319093 - DNA, 25 bp, Probe Sequence
ttgaccatctgcctccgaggaatgg

SEQ ID NO: 319094 - DNA, 25 bp, Probe Sequence
ttgactatctgactccaaggaatgg

SEQ ID NO: 319095 - DNA, 25 bp, Probe Sequence
ttgtcattgctgtcagcctcagtga

SEQ ID NO: 319096 - DNA, 25 bp, Probe Sequence
ttgatctgcttgtagcaccagctat

SEQ ID NO: 319097 - DNA, 25 bp, Probe Sequence
ttgatctgtaatgcaccactgtcgt

SEQ ID NO: 319098 - DNA, 25 bp, Probe Sequence
ttgatgtcaacaatcccctgcatct

SEQ ID NO: 319099 - DNA, 25 bp, Probe Sequence
ttgttgccatcaatgaccccttcat

SEQ ID NO: 319100 - DNA, 25 bp, Probe Sequence
ttgagtgcttgcatgagctccactt

SEQ ID NO: 319101 - DNA, 25 bp, Probe Sequence
ttgggttgcagactgccaacttctc

SEQ ID NO: 319102 - DNA, 25 bp, Probe Sequence
ttggtgattgcattgggaaattccc

SEQ ID NO: 319103 - DNA, 25 bp, Probe Sequence
ttgagcttctcattgtgtagaattt

SEQ ID NO: 319104 - DNA, 25 bp, Probe Sequence
ttgatcattcttttatagagcatat

SEQ ID NO: 319105 - DNA, 25 bp, Probe Sequence
ttgatttctatataggcagctcata

SEQ ID NO: 319106 - DNA, 25 bp, Probe Sequence
ttgtttcttcaattgtgactgttaa

SEQ ID NO: 319107 - DNA, 25 bp, Probe Sequence
ttgtttagtcaaagctactatgtgc

SEQ ID NO: 319108 - DNA, 25 bp, Probe Sequence
ttggcttagtcagcttagcatcatg

SEQ ID NO: 319109 - DNA, 25 bp, Probe Sequence
ttggtctcaacctttaccatggaga

SEQ ID NO: 319110 - DNA, 25 bp, Probe Sequence
ttggcttaacaatatagctcgaaga

SEQ ID NO: 319111 - DNA, 25 bp, Probe Sequence
ttggattcccagtgtggtctgagag

SEQ ID NO: 319112 - DNA, 25 bp, Probe Sequence
ttggcttgctccaggttgggcagaa

SEQ ID NO: 319113 - DNA, 25 bp, Probe Sequence
ttggcctctccttgaggtgggcaca

SEQ ID NO: 319114 - DNA, 25 bp, Probe Sequence
ttggacttcctgtggcacaacatga

SEQ ID NO: 319115 - DNA, 25 bp, Probe Sequence
ttggaatcatcccaaggcatcccaa

SEQ ID NO: 319116 - DNA, 25 bp, Probe Sequence
ttgtgacagtcaaaaggacgtgcaa

SEQ ID NO: 319117 - DNA, 25 bp, Probe Sequence
ttggcatcaacaaatactgagggat

SEQ ID NO: 319118 - DNA, 25 bp, Probe Sequence
ttgtcacaagcacatatggctggac

SEQ ID NO: 319119 - DNA, 25 bp, Probe Sequence
ttggcatggacaccatctggcgagg

SEQ ID NO: 319120 - DNA, 25 bp, Probe Sequence
ttggcatgaacattactgcaggttt

SEQ ID NO: 319121 - DNA, 25 bp, Probe Sequence
ttggcagttgcattagtaactttga

SEQ ID NO: 319122 - DNA, 25 bp, Probe Sequence
ttggcagttaatttaggcgtctaga

SEQ ID NO: 319123 - DNA, 25 bp, Probe Sequence
ttggcgttactgttggacttgggca

SEQ ID NO: 319124 - DNA, 25 bp, Probe Sequence
ttggcgtatactgattcctccaact

SEQ ID NO: 319125 - DNA, 25 bp, Probe Sequence
ttgtgggagccgcatatcacccaac

SEQ ID NO: 319126 - DNA, 25 bp, Probe Sequence
ttgggaagtctccatatacactaga

SEQ ID NO: 319127 - DNA, 25 bp, Probe Sequence
ttgggcgagtgccttatccaagaat

SEQ ID NO: 319128 - DNA, 25 bp, Probe Sequence
ttggggaatccttttcagagcaata

SEQ ID NO: 319129 - DNA, 25 bp, Probe Sequence
ttgggagcagtcctatgtctcagtg

SEQ ID NO: 319130 - DNA, 25 bp, Probe Sequence
ttgggaccatcactgagagtcagga

SEQ ID NO: 319131 - DNA, 25 bp, Probe Sequence
ttgggaccacagtatgtcgcaggca

SEQ ID NO: 319132 - DNA, 25 bp, Probe Sequence
ttggcagacagagaattggagtgaa

SEQ ID NO: 319133 - DNA, 25 bp, Probe Sequence
ttgaggatagatgcaggcgggtgag

SEQ ID NO: 319134 - DNA, 25 bp, Probe Sequence
ttgggcatcgcatggggggaggcaa

SEQ ID NO: 319135 - DNA, 25 bp, Probe Sequence
ttgtggcttcaagtgtgggtggaca

SEQ ID NO: 319136 - DNA, 25 bp, Probe Sequence
ttgatcgctcctttgtggggaagca

SEQ ID NO: 319137 - DNA, 25 bp, Probe Sequence
ttgatgactcgctcattggtggaaa

SEQ ID NO: 319138 - DNA, 25 bp, Probe Sequence
ttgatgccatatgccttggggagga

SEQ ID NO: 319139 - DNA, 25 bp, Probe Sequence
ttgtgcaccaaccttcgggattgaa

SEQ ID NO: 319140 - DNA, 25 bp, Probe Sequence
ttgtgaaacattgtgtgggattgat

SEQ ID NO: 319141 - DNA, 25 bp, Probe Sequence
ttggcagtacttcaatgggcttgat

SEQ ID NO: 319142 - DNA, 25 bp, Probe Sequence
ttggcagtatttcagctggctggag

SEQ ID NO: 319143 - DNA, 25 bp, Probe Sequence
ttgggttgttccttgaggggcaaag

SEQ ID NO: 319144 - DNA, 25 bp, Probe Sequence
ttgggtggtgtccactgggcgaaaa

SEQ ID NO: 319145 - DNA, 25 bp, Probe Sequence
ttgtggctagcagcaaatggtgaca

SEQ ID NO: 319146 - DNA, 25 bp, Probe Sequence
ttgatggcgagaaccaaggagtagg

SEQ ID NO: 319147 - DNA, 25 bp, Probe Sequence
ttggcagcgtcaagtcagaggaggg

SEQ ID NO: 319148 - DNA, 25 bp, Probe Sequence
ttggaagtcaataaggtggccggaa

SEQ ID NO: 319149 - DNA, 25 bp, Probe Sequence
ttgtcaagatttacaggctgggcgt

SEQ ID NO: 319150 - DNA, 25 bp, Probe Sequence
ttgtcaaattttatgctgtgtggaa

SEQ ID NO: 319151 - DNA, 25 bp, Probe Sequence
ttgataactgtttatatgtgttgaa

SEQ ID NO: 319152 - DNA, 25 bp, Probe Sequence
ttggcacatctttctatactttata

SEQ ID NO: 319153 - DNA, 25 bp, Probe Sequence
ttggcgcatctatagtggcatttta

SEQ ID NO: 319154 - DNA, 25 bp, Probe Sequence
ttggtagtcataggtggcacttcta

SEQ ID NO: 319155 - DNA, 25 bp, Probe Sequence
ttggtagtcataggtggcacttcta

SEQ ID NO: 319156 - DNA, 25 bp, Probe Sequence
ttggtagtgtggggatcctggcttt

SEQ ID NO: 319157 - DNA, 25 bp, Probe Sequence
ttgacctggtggtagatccacctgt

SEQ ID NO: 319158 - DNA, 25 bp, Probe Sequence
ttgacctggtttaacccttctgata

SEQ ID NO: 319159 - DNA, 25 bp, Probe Sequence
ttgacctgttataaacactttctta

SEQ ID NO: 319160 - DNA, 25 bp, Probe Sequence
ttgagccagttttaatcgctttgaa

SEQ ID NO: 319161 - DNA, 25 bp, Probe Sequence
ttggccagtatgtgaccttcttgag

SEQ ID NO: 319162 - DNA, 25 bp, Probe Sequence
ttggcaaatgagtttcgctgttatg

SEQ ID NO: 319163 - DNA, 25 bp, Probe Sequence
ttggcagcaaagtgtcagtgttggc

SEQ ID NO: 319164 - DNA, 25 bp, Probe Sequence
ttgaggcaggcgtgtcacttgaggc

SEQ ID NO: 319165 - DNA, 25 bp, Probe Sequence
ttgggagcctcatctgcaatgtagg

SEQ ID NO: 319166 - DNA, 25 bp, Probe Sequence
ttggggtcaggactgcattctcagg

SEQ ID NO: 319167 - DNA, 25 bp, Probe Sequence
ttggggatcaggcagcctcctgatg

SEQ ID NO: 319168 - DNA, 25 bp, Probe Sequence
ttggggatcaggcagcctcctgatg

SEQ ID NO: 319169 - DNA, 25 bp, Probe Sequence
ttggggatcaggcagcctcctgatg

SEQ ID NO: 319170 - DNA, 25 bp, Probe Sequence
ttggggagctggagcccagcatgct

SEQ ID NO: 319171 - DNA, 25 bp, Probe Sequence
ttgggaggtggaggcccagcatccc

SEQ ID NO: 319172 - DNA, 25 bp, Probe Sequence
ttggagggctggacggcaagtccgt

SEQ ID NO: 319173 - DNA, 25 bp, Probe Sequence
ttgggaggcttgtgcgaggtctcag

SEQ ID NO: 319174 - DNA, 25 bp, Probe Sequence
ttggggtgctgatctcgagtgttat

SEQ ID NO: 319175 - DNA, 25 bp, Probe Sequence
ttgggagtctgaattctcaagtttg

SEQ ID NO: 319176 - DNA, 25 bp, Probe Sequence
ttggagatgcccattctacttttga

SEQ ID NO: 319177 - DNA, 25 bp, Probe Sequence
ttggagatgccattttcaccttttt

SEQ ID NO: 319178 - DNA, 25 bp, Probe Sequence
ttgagttgaataattaccctttctt

SEQ ID NO: 319179 - DNA, 25 bp, Probe Sequence
ttgtgtggttatatagccctttatt

SEQ ID NO: 319180 - DNA, 25 bp, Probe Sequence
ttgtttgttttatcacttctatatt

SEQ ID NO: 319181 - DNA, 25 bp, Probe Sequence
ttgtttgttttatcacttctatatt

SEQ ID NO: 319182 - DNA, 25 bp, Probe Sequence
ttgtttgtttatttgtttttgagat

SEQ ID NO: 319183 - DNA, 25 bp, Probe Sequence
ttgtcattttttttttttagcatag

SEQ ID NO: 319184 - DNA, 25 bp, Probe Sequence
ttgtgttacttttattatttggatg

SEQ ID NO: 319185 - DNA, 25 bp, Probe Sequence
ttgtctttgctttatcttattaggg

SEQ ID NO: 319186 - DNA, 25 bp, Probe Sequence
ttgtcttattgtttctctactaaga

SEQ ID NO: 319187 - DNA, 25 bp, Probe Sequence
ttgtttgcatgtattctctaagaga

SEQ ID NO: 319188 - DNA, 25 bp, Probe Sequence
ttggttcatgataactgccctgaaa

SEQ ID NO: 319189 - DNA, 25 bp, Probe Sequence
ttgtgttcaataacccaaacatcaa

SEQ ID NO: 319190 - DNA, 25 bp, Probe Sequence
ttgtcttaagagaacatcataaaca

SEQ ID NO: 319191 - DNA, 25 bp, Probe Sequence
ttggcattaatacgacataaagaca

SEQ ID NO: 319192 - DNA, 25 bp, Probe Sequence
ttgagatttataccacataccacac

SEQ ID NO: 319193 - DNA, 25 bp, Probe Sequence
ttggattgtatatcattgttgcaca

SEQ ID NO: 319194 - DNA, 25 bp, Probe Sequence
ttggatctagacagcatctgttcaa

SEQ ID NO: 319195 - DNA, 25 bp, Probe Sequence
ttgtgacttacttatctgtatcggt

SEQ ID NO: 319196 - DNA, 25 bp, Probe Sequence
ttggccttaccagttgtcaggagtc

SEQ ID NO: 319197 - DNA, 25 bp, Probe Sequence
ttgtgccttactatatatgggaatg

SEQ ID NO: 319198 - DNA, 25 bp, Probe Sequence
ttgtcttgttctgtgatgaggggag

SEQ ID NO: 319199 - DNA, 25 bp, Probe Sequence
ttgtcttgcttatggcatgagggac

SEQ ID NO: 319200 - DNA, 25 bp, Probe Sequence
ttggcttctgtactggctgaggaca

SEQ ID NO: 319201 - DNA, 25 bp, Probe Sequence
ttggcttctgtactggctgaggaca

SEQ ID NO: 319202 - DNA, 25 bp, Probe Sequence
ttggcttctgtactggctgaggaca

SEQ ID NO: 319203 - DNA, 25 bp, Probe Sequence
ttggctttgcaagggctctgtgaca

SEQ ID NO: 319204 - DNA, 25 bp, Probe Sequence
ttgtgacttcaagagcctctggcat

SEQ ID NO: 319205 - DNA, 25 bp, Probe Sequence
ttgtgacttcaagaaccctgactcc

SEQ ID NO: 319206 - DNA, 25 bp, Probe Sequence
ttgtgacttcaagaaccctgactcc

SEQ ID NO: 319207 - DNA, 25 bp, Probe Sequence
ttgtgacttcaagaaccctgactcc

SEQ ID NO: 319208 - DNA, 25 bp, Probe Sequence
ttggatttcgatgaaccggtccctg

SEQ ID NO: 319209 - DNA, 25 bp, Probe Sequence
ttggcatttttcaacccagtgtcac

SEQ ID NO: 319210 - DNA, 25 bp, Probe Sequence
ttggcttgaagcctaccacgatgtc

SEQ ID NO: 319211 - DNA, 25 bp, Probe Sequence
ttggcctgaagtcccagcattgatg

SEQ ID NO: 319212 - DNA, 25 bp, Probe Sequence
ttggcctgaagtcccagcattgatg

SEQ ID NO: 319213 - DNA, 25 bp, Probe Sequence
ttggctgtgaagctgcagacttata

SEQ ID NO: 319214 - DNA, 25 bp, Probe Sequence
ttggctgtgatgggctcatactcat

SEQ ID NO: 319215 - DNA, 25 bp, Probe Sequence
ttggcctatgcacgtctcagagcat

SEQ ID NO: 319216 - DNA, 25 bp, Probe Sequence
ttggcattgacacatgtcgcagcat

SEQ ID NO: 319217 - DNA, 25 bp, Probe Sequence
ttggctatgatgcctatgtcacctt

SEQ ID NO: 319218 - DNA, 25 bp, Probe Sequence
ttggctgatgtgcacagtctggctc

SEQ ID NO: 319219 - DNA, 25 bp, Probe Sequence
ttgtgtgattgaatctgattggaca

SEQ ID NO: 319220 - DNA, 25 bp, Probe Sequence
ttggccactacactgcatatgcgaa

SEQ ID NO: 319221 - DNA, 25 bp, Probe Sequence
ttggccacatgcaagtgtgagcaga

SEQ ID NO: 319222 - DNA, 25 bp, Probe Sequence
ttggccacactcatgtggatgaatt

SEQ ID NO: 319223 - DNA, 25 bp, Probe Sequence
ttggccacatatatgcgaatctata

SEQ ID NO: 319224 - DNA, 25 bp, Probe Sequence
ttgggcacatgctcaggctactata

SEQ ID NO: 319225 - DNA, 25 bp, Probe Sequence
ttgtctgcagtgatagagtcactat

SEQ ID NO: 319226 - DNA, 25 bp, Probe Sequence
ttggctgcattaaaagaagcatcat

SEQ ID NO: 319227 - DNA, 25 bp, Probe Sequence
ttgagctttcaaacacacatgcaca

SEQ ID NO: 319228 - DNA, 25 bp, Probe Sequence
ttgtgcattgtccacaacctgctca

SEQ ID NO: 319229 - DNA, 25 bp, Probe Sequence
ttgtcactgtcatcagaatctgtcg

SEQ ID NO: 319230 - DNA, 25 bp, Probe Sequence
ttgtcaattcattaacactgccatg

SEQ ID NO: 319231 - DNA, 25 bp, Probe Sequence
ttgtaattcaaatccattcagtgct

SEQ ID NO: 319232 - DNA, 25 bp, Probe Sequence
ttgtattgtcaaccccagtcagtaa

SEQ ID NO: 319233 - DNA, 25 bp, Probe Sequence
ttgtattgtaagcacacatgtaatt

SEQ ID NO: 319234 - DNA, 25 bp, Probe Sequence
ttgtatagtacgtctcacttgaaat

SEQ ID NO: 319235 - DNA, 25 bp, Probe Sequence
ttgtgatattacttcgctattaaat

SEQ ID NO: 319236 - DNA, 25 bp, Probe Sequence
ttgagatgcattattcctattacta

SEQ ID NO: 319237 - DNA, 25 bp, Probe Sequence
ttgagatgcattattcctattacta

SEQ ID NO: 319238 - DNA, 25 bp, Probe Sequence
ttgagacagtcaatagcctatctac

SEQ ID NO: 319239 - DNA, 25 bp, Probe Sequence
ttgataagtcagtatgccatattta

SEQ ID NO: 319240 - DNA, 25 bp, Probe Sequence
ttgtacagcatgctatctatagtta

SEQ ID NO: 319241 - DNA, 25 bp, Probe Sequence
ttgatgacagcgcctcatcttcaac

SEQ ID NO: 319242 - DNA, 25 bp, Probe Sequence
ttgatggcagtgcctcatcttcaac

SEQ ID NO: 319243 - DNA, 25 bp, Probe Sequence
ttgtggctgtggacatctttcaaca

SEQ ID NO: 319244 - DNA, 25 bp, Probe Sequence
ttgtgtcataagacatcttcaagac

SEQ ID NO: 319245 - DNA, 25 bp, Probe Sequence
ttgagatcatcattgatacttctta

SEQ ID NO: 319246 - DNA, 25 bp, Probe Sequence
ttgattcacattaagctgctttcag

SEQ ID NO: 319247 - DNA, 25 bp, Probe Sequence
ttggctgacaggaagctcagttcag

SEQ ID NO: 319248 - DNA, 25 bp, Probe Sequence
ttggacacacagtgtcttcctgttt

SEQ ID NO: 319249 - DNA, 25 bp, Probe Sequence
ttggactaaatgctcttccttcaga

SEQ ID NO: 319250 - DNA, 25 bp, Probe Sequence
ttggactgaaagtgctttccggaag

SEQ ID NO: 319251 - DNA, 25 bp, Probe Sequence
ttggcactggaagggtagttctgga

SEQ ID NO: 319252 - DNA, 25 bp, Probe Sequence
ttggcactggaagggtagttctgga

SEQ ID NO: 319253 - DNA, 25 bp, Probe Sequence
ttgtcctgtgaagagttgagtgctg

SEQ ID NO: 319254 - DNA, 25 bp, Probe Sequence
ttgtgcttggaatgtgttgatgtgc

SEQ ID NO: 319255 - DNA, 25 bp, Probe Sequence
ttgtcatagggaggatttgagctca

SEQ ID NO: 319256 - DNA, 25 bp, Probe Sequence
ttgtctgagatgctggtaatggcca

SEQ ID NO: 319257 - DNA, 25 bp, Probe Sequence
ttgttgcaaagtagtgaatggcaaa

SEQ ID NO: 319258 - DNA, 25 bp, Probe Sequence
ttgtctacaagtcctgaatcctgaa

SEQ ID NO: 319259 - DNA, 25 bp, Probe Sequence
ttgtctacaatgcatctaataacga

SEQ ID NO: 319260 - DNA, 25 bp, Probe Sequence
ttgtctgacacatgctctcaatata

SEQ ID NO: 319261 - DNA, 25 bp, Probe Sequence
ttgtgctacaaagttctttgggttt

SEQ ID NO: 319262 - DNA, 25 bp, Probe Sequence
ttgtctccataagcctgtttttttt

SEQ ID NO: 319263 - DNA, 25 bp, Probe Sequence
ttgtcgctattaacatccttttttt

SEQ ID NO: 319264 - DNA, 25 bp, Probe Sequence
ttgtcagtctacaatgcccttattt

SEQ ID NO: 319265 - DNA, 25 bp, Probe Sequence
ttgtcacttgaatcccgtgattgtc

SEQ ID NO: 319266 - DNA, 25 bp, Probe Sequence
ttgtgcactgtgtatggtccgtgta

SEQ ID NO: 319267 - DNA, 25 bp, Probe Sequence
ttgtgcactgtgtatggtccgtgta

SEQ ID NO: 319268 - DNA, 25 bp, Probe Sequence
ttgtgcactgtgtatggtccgtgta

SEQ ID NO: 319269 - DNA, 25 bp, Probe Sequence
ttgtgcactgtgtatggtccgtgta

SEQ ID NO: 319270 - DNA, 25 bp, Probe Sequence
ttggatgcttttggtcctgtgttgc

SEQ ID NO: 319271 - DNA, 25 bp, Probe Sequence
ttgggtgtttcattccatttctgcc

SEQ ID NO: 319272 - DNA, 25 bp, Probe Sequence
ttggggtcctgatactcattcccat

SEQ ID NO: 319273 - DNA, 25 bp, Probe Sequence
ttggggtcgtattcctgatttcaga

SEQ ID NO: 319274 - DNA, 25 bp, Probe Sequence
ttgggtgtgtgttcatccttgttaa

SEQ ID NO: 319275 - DNA, 25 bp, Probe Sequence
ttgggtgagtacaaccttgctgtga

SEQ ID NO: 319276 - DNA, 25 bp, Probe Sequence
ttgagtggtgtaaaactatgtgctc

SEQ ID NO: 319277 - DNA, 25 bp, Probe Sequence
ttggtcagttacaaactttgctatg

SEQ ID NO: 319278 - DNA, 25 bp, Probe Sequence
ttgttactgctactacactttgctc

SEQ ID NO: 319279 - DNA, 25 bp, Probe Sequence
ttgtaactgcatggaaacttttcac

SEQ ID NO: 319280 - DNA, 25 bp, Probe Sequence
ttgatgaactgtggaacctgcctcc

SEQ ID NO: 319281 - DNA, 25 bp, Probe Sequence
ttgggactgctgtgaacatgcctcc

SEQ ID NO: 319282 - DNA, 25 bp, Probe Sequence
ttgtgaacagctctacaatcccatc

SEQ ID NO: 319283 - DNA, 25 bp, Probe Sequence
ttgtcagagcccatatcaacaactc

SEQ ID NO: 319284 - DNA, 25 bp, Probe Sequence
ttgtacagacctgcttgacagactc

SEQ ID NO: 319285 - DNA, 25 bp, Probe Sequence
ttgtagaacctggcgatctcacact

SEQ ID NO: 319286 - DNA, 25 bp, Probe Sequence
ttgattgtactcatgctgttccact

SEQ ID NO: 319287 - DNA, 25 bp, Probe Sequence
ttgttgtgactctatgtttgctcca

SEQ ID NO: 319288 - DNA, 25 bp, Probe Sequence
ttgatggggctctgatttgctcttg

SEQ ID NO: 319289 - DNA, 25 bp, Probe Sequence
ttgtggtggctctgaatgtcttcaa

SEQ ID NO: 319290 - DNA, 25 bp, Probe Sequence
ttgtgtgtctgttaaatgaatgtca

SEQ ID NO: 319291 - DNA, 25 bp, Probe Sequence
ttggatatctcatatactgcatatt

SEQ ID NO: 319292 - DNA, 25 bp, Probe Sequence
ttgagtacatatactgacagctcat

SEQ ID NO: 319293 - DNA, 25 bp, Probe Sequence
ttgatgtgactttctgacactgatt

SEQ ID NO: 319294 - DNA, 25 bp, Probe Sequence
ttggtgaagctgtctgcacctgtca

SEQ ID NO: 319295 - DNA, 25 bp, Probe Sequence
ttggttcagctgtcaggcgtgtgcc

SEQ ID NO: 319296 - DNA, 25 bp, Probe Sequence
ttggttcatgcttctactgtgacac

SEQ ID NO: 319297 - DNA, 25 bp, Probe Sequence
ttgtgttctgctgaagtctgccacg

SEQ ID NO: 319298 - DNA, 25 bp, Probe Sequence
ttggtccatctcaaaggcagaagcg

SEQ ID NO: 319299 - DNA, 25 bp, Probe Sequence
ttgagtccttgcaacagaaaccatt

SEQ ID NO: 319300 - DNA, 25 bp, Probe Sequence
ttgggccttccatgaccaacttaat

SEQ ID NO: 319301 - DNA, 25 bp, Probe Sequence
ttggccctaccttaaagacaaacat

SEQ ID NO: 319302 - DNA, 25 bp, Probe Sequence
ttggtcgctacccacaggagaacaa

SEQ ID NO: 319303 - DNA, 25 bp, Probe Sequence
ttggtcctcagcacctgtaagaaca

SEQ ID NO: 319304 - DNA, 25 bp, Probe Sequence
ttgttccctcattctgcattaataa

SEQ ID NO: 319305 - DNA, 25 bp, Probe Sequence
ttgtcagccctatctcaaacttgaa

SEQ ID NO: 319306 - DNA, 25 bp, Probe Sequence
ttgtcagccctatctcaaacttgaa

SEQ ID NO: 319307 - DNA, 25 bp, Probe Sequence
ttgtcccctagattgagttttgaag

SEQ ID NO: 319308 - DNA, 25 bp, Probe Sequence
ttggaatcactagggagcttttgaa

SEQ ID NO: 319309 - DNA, 25 bp, Probe Sequence
ttgtggacacttctgagttttgaca

SEQ ID NO: 319310 - DNA, 25 bp, Probe Sequence
ttgtcttccattccattgttttgaa

SEQ ID NO: 319311 - DNA, 25 bp, Probe Sequence
ttgttatctgcatctcattgtttat

SEQ ID NO: 319312 - DNA, 25 bp, Probe Sequence
ttggttctgccactcattggttatg

SEQ ID NO: 319313 - DNA, 25 bp, Probe Sequence
ttggttctcctgcattgagatttga

SEQ ID NO: 319314 - DNA, 25 bp, Probe Sequence
ttgtatttactgccatgtaattgaa

SEQ ID NO: 319315 - DNA, 25 bp, Probe Sequence
ttgtattactctccatgtgtataaa

SEQ ID NO: 319316 - DNA, 25 bp, Probe Sequence
ttggcagtacatcaagtgtatcata

SEQ ID NO: 319317 - DNA, 25 bp, Probe Sequence
ttggcagtacatcaagtgtatcata

SEQ ID NO: 319318 - DNA, 25 bp, Probe Sequence
ttggcagtacatcaagtgtatcata

SEQ ID NO: 319319 - DNA, 25 bp, Probe Sequence
ttggcctctcatctcagtggatata

SEQ ID NO: 319320 - DNA, 25 bp, Probe Sequence
ttggcctctcatctcagtggatata

SEQ ID NO: 319321 - DNA, 25 bp, Probe Sequence
ttggattctctcatcaaggctacaa

SEQ ID NO: 319322 - DNA, 25 bp, Probe Sequence
ttgtggtcctggccaagagctacaa

SEQ ID NO: 319323 - DNA, 25 bp, Probe Sequence
ttggggcctatgcagaggtccacaa

SEQ ID NO: 319324 - DNA, 25 bp, Probe Sequence
ttgtggagcgctgggagcaggacct

SEQ ID NO: 319325 - DNA, 25 bp, Probe Sequence
ttgaggaggctcccaagggcatgct

SEQ ID NO: 319326 - DNA, 25 bp, Probe Sequence
ttgggatcacacccacgggtgctac

SEQ ID NO: 319327 - DNA, 25 bp, Probe Sequence
ttgggccagaacgacacgggcttca

SEQ ID NO: 319328 - DNA, 25 bp, Probe Sequence
ttggcgccatatataagcctggtta

SEQ ID NO: 319329 - DNA, 25 bp, Probe Sequence
ttggcggcatgaatgtatctgtctg

SEQ ID NO: 319330 - DNA, 25 bp, Probe Sequence
ttggctggcagctgtatgatgtccc

SEQ ID NO: 319331 - DNA, 25 bp, Probe Sequence
ttggctgccacaagtagatgctctc

SEQ ID NO: 319332 - DNA, 25 bp, Probe Sequence
ttggcgcccacagtgatgatgtcga

SEQ ID NO: 319333 - DNA, 25 bp, Probe Sequence
ttgtggaccacaaatgatgtcttcc

SEQ ID NO: 319334 - DNA, 25 bp, Probe Sequence
ttgttgatcacaaaagttcttccag

SEQ ID NO: 319335 - DNA, 25 bp, Probe Sequence
ttgtagatcatagaaggtcttcctt

SEQ ID NO: 319336 - DNA, 25 bp, Probe Sequence
ttgattgaaaataaggtctacacct

SEQ ID NO: 319337 - DNA, 25 bp, Probe Sequence
ttgattgtatactgagtgtccaaac

SEQ ID NO: 319338 - DNA, 25 bp, Probe Sequence
ttgtttatacactgttctccaaagg

SEQ ID NO: 319339 - DNA, 25 bp, Probe Sequence
ttgttttcccagttattcaaagcag

SEQ ID NO: 319340 - DNA, 25 bp, Probe Sequence
ttgttttcccttggtctaatggaga

SEQ ID NO: 319341 - DNA, 25 bp, Probe Sequence
ttgttttgcacctaaatcgacggga

SEQ ID NO: 319342 - DNA, 25 bp, Probe Sequence
ttgttttgctaccaatatcatacgg

SEQ ID NO: 319343 - DNA, 25 bp, Probe Sequence
ttgtccatttactagattcaatcgt

SEQ ID NO: 319344 - DNA, 25 bp, Probe Sequence
ttgtcctttcctggttcaaagcacc

SEQ ID NO: 319345 - DNA, 25 bp, Probe Sequence
ttgtccttcccatgttcattaattc

SEQ ID NO: 319346 - DNA, 25 bp, Probe Sequence
ttgtccttcccatgttcattaattc

SEQ ID NO: 319347 - DNA, 25 bp, Probe Sequence
ttgtcctctgactaggtttctaatt

SEQ ID NO: 319348 - DNA, 25 bp, Probe Sequence
ttgtgcctttgatggtgttcatttg

SEQ ID NO: 319349 - DNA, 25 bp, Probe Sequence
ttgtcagtttgagggagcttccttc

SEQ ID NO: 319350 - DNA, 25 bp, Probe Sequence
ttgtggagattcgctgacttccttg

SEQ ID NO: 319351 - DNA, 25 bp, Probe Sequence
ttggtggtattggtactgtctcctg

SEQ ID NO: 319352 - DNA, 25 bp, Probe Sequence
ttggtatgtcttttatctatcccag

SEQ ID NO: 319353 - DNA, 25 bp, Probe Sequence
ttggaagtttgcttctctgagcctc

SEQ ID NO: 319354 - DNA, 25 bp, Probe Sequence
ttggtagattgacttgctcttgcct

SEQ ID NO: 319355 - DNA, 25 bp, Probe Sequence
ttggctcgataatatcgctggccta

SEQ ID NO: 319356 - DNA, 25 bp, Probe Sequence
ttgggcagtacatacatgggcgtga

SEQ ID NO: 319357 - DNA, 25 bp, Probe Sequence
ttggtgatgggctacactgggctgg

SEQ ID NO: 319358 - DNA, 25 bp, Probe Sequence
ttgaggtgggctccctggtatggta

SEQ ID NO: 319359 - DNA, 25 bp, Probe Sequence
ttggagctgggtgcagtggcttgtg

SEQ ID NO: 319360 - DNA, 25 bp, Probe Sequence
ttgtgagctggggattcggctgtgc

SEQ ID NO: 319361 - DNA, 25 bp, Probe Sequence
ttggagatggtggtggggctgctga

SEQ ID NO: 319362 - DNA, 25 bp, Probe Sequence
ttgggagtggttgtggctctgagct

SEQ ID NO: 319363 - DNA, 25 bp, Probe Sequence
ttgggatttttggtgcttatatgct

SEQ ID NO: 319364 - DNA, 25 bp, Probe Sequence
ttgggactttatcagattccagctg

SEQ ID NO: 319365 - DNA, 25 bp, Probe Sequence
ttgggtattctacaacttcaatgga

SEQ ID NO: 319366 - DNA, 25 bp, Probe Sequence
ttgaggctttgctagccaacccaga

SEQ ID NO: 319367 - DNA, 25 bp, Probe Sequence
ttgggctttatggacagaccacagg

SEQ ID NO: 319368 - DNA, 25 bp, Probe Sequence
ttggcgttgttcaggaccacagcga

SEQ ID NO: 319369 - DNA, 25 bp, Probe Sequence
ttggagttctttccgaccagtgaga

SEQ ID NO: 319370 - DNA, 25 bp, Probe Sequence
ttgggtgtctttacttcacatctga

SEQ ID NO: 319371 - DNA, 25 bp, Probe Sequence
ttgggctgctttaacctcagcatcc

SEQ ID NO: 319372 - DNA, 25 bp, Probe Sequence
ttgtggcactttatcttcaagccag

SEQ ID NO: 319373 - DNA, 25 bp, Probe Sequence
ttgtggctttttattagagctcgcc

SEQ ID NO: 319374 - DNA, 25 bp, Probe Sequence
ttgtgactttggagtggaagcttcc

SEQ ID NO: 319375 - DNA, 25 bp, Probe Sequence
ttgtgactattgttggtcaaagtat

SEQ ID NO: 319376 - DNA, 25 bp, Probe Sequence
ttgtgactggctttggtgcaaatgt

SEQ ID NO: 319377 - DNA, 25 bp, Probe Sequence
ttgtatttgctcttgtataattgtt

SEQ ID NO: 319378 - DNA, 25 bp, Probe Sequence
ttgatatttgtgtctgttactactt

SEQ ID NO: 319379 - DNA, 25 bp, Probe Sequence
ttgatcattattcctgtattttctc

SEQ ID NO: 319380 - DNA, 25 bp, Probe Sequence
ttgatcgttctggctggctatttca

SEQ ID NO: 319381 - DNA, 25 bp, Probe Sequence
ttgtctgacgctctgtgtattgctc

SEQ ID NO: 319382 - DNA, 25 bp, Probe Sequence
ttgtctagctcctttggatgcagtc

SEQ ID NO: 319383 - DNA, 25 bp, Probe Sequence
ttgttactctttctgatgatgattc

SEQ ID NO: 319384 - DNA, 25 bp, Probe Sequence
ttgttagtttcgtttgagatctcaa

SEQ ID NO: 319385 - DNA, 25 bp, Probe Sequence
ttgtggagtacgctttggactgaga

SEQ ID NO: 319386 - DNA, 25 bp, Probe Sequence
ttgtaggaaaggttgtgccctggca

SEQ ID NO: 319387 - DNA, 25 bp, Probe Sequence
ttgtagagacaaggcattgctgcgc

SEQ ID NO: 319388 - DNA, 25 bp, Probe Sequence
ttgatcagaacagggctttggtcga

SEQ ID NO: 319389 - DNA, 25 bp, Probe Sequence
ttgatcagaacagggctttggtcga

SEQ ID NO: 319390 - DNA, 25 bp, Probe Sequence
ttgtcaggagacggctcttctttga

SEQ ID NO: 319391 - DNA, 25 bp, Probe Sequence
ttgtgcaggacatgcgtctcatctt

SEQ ID NO: 319392 - DNA, 25 bp, Probe Sequence
ttggtgcgacactgtgcattgcatt

SEQ ID NO: 319393 - DNA, 25 bp, Probe Sequence
ttgtgtgcagaatagtatatctttt

SEQ ID NO: 319394 - DNA, 25 bp, Probe Sequence
ttgtgtagtaaactttcttttgtgg

SEQ ID NO: 319395 - DNA, 25 bp, Probe Sequence
ttggtactgacagttttcttttgcc

SEQ ID NO: 319396 - DNA, 25 bp, Probe Sequence
ttggtggcgaatgtgttgcgggtcc

SEQ ID NO: 319397 - DNA, 25 bp, Probe Sequence
ttgtgggggtgattctgggggtcca

SEQ ID NO: 319398 - DNA, 25 bp, Probe Sequence
ttgggggtatgatcaggaggttaga

SEQ ID NO: 319399 - DNA, 25 bp, Probe Sequence
ttgtggggatagtaagctggggaga

SEQ ID NO: 319400 - DNA, 25 bp, Probe Sequence
ttggggaaggaagtgcgctggagaa

SEQ ID NO: 319401 - DNA, 25 bp, Probe Sequence
ttgggggggccattgcagctataaa

SEQ ID NO: 319402 - DNA, 25 bp, Probe Sequence
ttgggggggccattgcagctataaa

SEQ ID NO: 319403 - DNA, 25 bp, Probe Sequence
ttgggctgtgggtttcagcttgaag

SEQ ID NO: 319404 - DNA, 25 bp, Probe Sequence
ttggggtgggcatttgatgcgggag

SEQ ID NO: 319405 - DNA, 25 bp, Probe Sequence
ttgggaggggcatttagatacagga

SEQ ID NO: 319406 - DNA, 25 bp, Probe Sequence
ttggtgaggggctttaggcccgcct

SEQ ID NO: 319407 - DNA, 25 bp, Probe Sequence
ttggtggaggagtgaaggcccccag

SEQ ID NO: 319408 - DNA, 25 bp, Probe Sequence
ttggtgctgggactccagaggccac

SEQ ID NO: 319409 - DNA, 25 bp, Probe Sequence
ttgaggcgcggaagctggaggccac

SEQ ID NO: 319410 - DNA, 25 bp, Probe Sequence
ttggtcgtggacgtggtcagccacc

SEQ ID NO: 319411 - DNA, 25 bp, Probe Sequence
ttggtcgtggacgtggtcagccacc

SEQ ID NO: 319412 - DNA, 25 bp, Probe Sequence
ttggtcaggcgcagtggctcatgcc

SEQ ID NO: 319413 - DNA, 25 bp, Probe Sequence
ttggtgagtctgtgtggccagcagc

SEQ ID NO: 319414 - DNA, 25 bp, Probe Sequence
ttggctgagggtgggagccacggcc

SEQ ID NO: 319415 - DNA, 25 bp, Probe Sequence
ttgtgagggctgggggcatccaggc

SEQ ID NO: 319416 - DNA, 25 bp, Probe Sequence
ttggaggccagcggggctggcgctg

SEQ ID NO: 319417 - DNA, 25 bp, Probe Sequence
ttggaggccagcggggctggcgctg

SEQ ID NO: 319418 - DNA, 25 bp, Probe Sequence
ttggaggccagcggggctggcgctg

SEQ ID NO: 319419 - DNA, 25 bp, Probe Sequence
ttggagcgctatgaggagggcctgg

SEQ ID NO: 319420 - DNA, 25 bp, Probe Sequence
ttggacgaactgctgcagggcctgc

SEQ ID NO: 319421 - DNA, 25 bp, Probe Sequence
ttggcaaggttggctgagggcaccc

SEQ ID NO: 319422 - DNA, 25 bp, Probe Sequence
ttgtgcaagcagtgcacggtgcccc

SEQ ID NO: 319423 - DNA, 25 bp, Probe Sequence
ttgtgaactttcaggtgctgcctca

SEQ ID NO: 319424 - DNA, 25 bp, Probe Sequence
ttgtcaccagttaagcaggctcctc

SEQ ID NO: 319425 - DNA, 25 bp, Probe Sequence
ttgtacatcagtcacagacctgccc

SEQ ID NO: 319426 - DNA, 25 bp, Probe Sequence
ttgatgtcacagaacaaggccccac

SEQ ID NO: 319427 - DNA, 25 bp, Probe Sequence
ttgtcatcaggaatcaaaacccaca

SEQ ID NO: 319428 - DNA, 25 bp, Probe Sequence
ttgttctctgatcataaacctcaga

SEQ ID NO: 319429 - DNA, 25 bp, Probe Sequence
ttgttctgctctaactgatacctca

SEQ ID NO: 319430 - DNA, 25 bp, Probe Sequence
ttgttgctgcttccctgaatgagta

SEQ ID NO: 319431 - DNA, 25 bp, Probe Sequence
ttgatttgggccttgaagagtaatt

SEQ ID NO: 319432 - DNA, 25 bp, Probe Sequence
ttgtttgggctgcctaacttccatt

SEQ ID NO: 319433 - DNA, 25 bp, Probe Sequence
ttgtttgtagtgctatccattcctc

SEQ ID NO: 319434 - DNA, 25 bp, Probe Sequence
ttgtttgtagtgctatccattcctc

SEQ ID NO: 319435 - DNA, 25 bp, Probe Sequence
ttggcatttaggattccatctggcc

SEQ ID NO: 319436 - DNA, 25 bp, Probe Sequence
ttggtgttgagcatattcctgggac

SEQ ID NO: 319437 - DNA, 25 bp, Probe Sequence
ttggctgattccattcttctgttac

SEQ ID NO: 319438 - DNA, 25 bp, Probe Sequence
ttggtgccataatttctcctttcac

SEQ ID NO: 319439 - DNA, 25 bp, Probe Sequence
ttgtgctgcctgaaaaccctattac

SEQ ID NO: 319440 - DNA, 25 bp, Probe Sequence
ttgtccctttagaatcctcattaca

SEQ ID NO: 319441 - DNA, 25 bp, Probe Sequence
ttgtctacttttaatcctctttgaa

SEQ ID NO: 319442 - DNA, 25 bp, Probe Sequence
ttgtctagctgtttgatttcatttt

SEQ ID NO: 319443 - DNA, 25 bp, Probe Sequence
ttgtgtgaggtcttactatatttat

SEQ ID NO: 319444 - DNA, 25 bp, Probe Sequence
ttgttgaacctgtattgattttttt

SEQ ID NO: 319445 - DNA, 25 bp, Probe Sequence
ttgtatgccaccaatttgtattatt

SEQ ID NO: 319446 - DNA, 25 bp, Probe Sequence
ttgttctccccaatgtgtattttaa

SEQ ID NO: 319447 - DNA, 25 bp, Probe Sequence
ttgatccaaccctcttattttcaga

SEQ ID NO: 319448 - DNA, 25 bp, Probe Sequence
ttgattagacccctctctttattaa

SEQ ID NO: 319449 - DNA, 25 bp, Probe Sequence
ttgtctaacacacttctttttctaa

SEQ ID NO: 319450 - DNA, 25 bp, Probe Sequence
ttgtagaaccgtagctctttctctg

SEQ ID NO: 319451 - DNA, 25 bp, Probe Sequence
ttggagaaccagggctcttctcagg

SEQ ID NO: 319452 - DNA, 25 bp, Probe Sequence
ttggaggaatcaccccatttcagag

SEQ ID NO: 319453 - DNA, 25 bp, Probe Sequence
ttgggagatactcccgctgtctcaa

SEQ ID NO: 319454 - DNA, 25 bp, Probe Sequence
ttgggagtaatgtgtgctctgtaag

SEQ ID NO: 319455 - DNA, 25 bp, Probe Sequence
ttgtggaaccagtgatgcctcaaag

SEQ ID NO: 319456 - DNA, 25 bp, Probe Sequence
ttgggacaacaatgatggtcagaat

SEQ ID NO: 319457 - DNA, 25 bp, Probe Sequence
ttgggaggaccatggggcacaatgc

SEQ ID NO: 319458 - DNA, 25 bp, Probe Sequence
ttgggaggccacagtgggcggactg

SEQ ID NO: 319459 - DNA, 25 bp, Probe Sequence
ttgggaggctaaggtgggtgggttg

SEQ ID NO: 319460 - DNA, 25 bp, Probe Sequence
ttggggtctacacggaggttgtgtt

SEQ ID NO: 319461 - DNA, 25 bp, Probe Sequence
ttgggactggactggcagggtggct

SEQ ID NO: 319462 - DNA, 25 bp, Probe Sequence
ttgggctccaggtggatgggttgct

SEQ ID NO: 319463 - DNA, 25 bp, Probe Sequence
ttgggaccaggtgggctgtgtccgc

SEQ ID NO: 319464 - DNA, 25 bp, Probe Sequence
ttggggccaggcatggtggctcaca

SEQ ID NO: 319465 - DNA, 25 bp, Probe Sequence
ttgggagccgaggaagatagatcac

SEQ ID NO: 319466 - DNA, 25 bp, Probe Sequence
ttgggaggctgacgcaggcggatca

SEQ ID NO: 319467 - DNA, 25 bp, Probe Sequence
ttgggaggctgaggcagagctgctt

SEQ ID NO: 319468 - DNA, 25 bp, Probe Sequence
ttgggaggctgaggcgggtggatca

SEQ ID NO: 319469 - DNA, 25 bp, Probe Sequence
ttgggaggccgaggcaggcggatca

SEQ ID NO: 319470 - DNA, 25 bp, Probe Sequence
ttgggaggccgaggcaggcggatca

SEQ ID NO: 319471 - DNA, 25 bp, Probe Sequence
ttgggaggccgaggcgggcagatca

SEQ ID NO: 319472 - DNA, 25 bp, Probe Sequence
ttgggaggccaaggcgggcagacca

SEQ ID NO: 319473 - DNA, 25 bp, Probe Sequence
ttgggaggccaaggcagccagatca

SEQ ID NO: 319474 - DNA, 25 bp, Probe Sequence
ttggaggtgccagggcagcaaacat

SEQ ID NO: 319475 - DNA, 25 bp, Probe Sequence
ttggaggtggcaaccaccagcacat

SEQ ID NO: 319476 - DNA, 25 bp, Probe Sequence
ttgtaggattcaacaaccaccacaa

SEQ ID NO: 319477 - DNA, 25 bp, Probe Sequence
ttgtactgatataaacacttccaaa

SEQ ID NO: 319478 - DNA, 25 bp, Probe Sequence
ttggatcgaattctcactctcacaa

SEQ ID NO: 319479 - DNA, 25 bp, Probe Sequence
ttgtatggaattcttattcaaatac

SEQ ID NO: 319480 - DNA, 25 bp, Probe Sequence
ttgtagcgaacactttgactccaaa

SEQ ID NO: 319481 - DNA, 25 bp, Probe Sequence
ttgtcacagaattttgagacccatt

SEQ ID NO: 319482 - DNA, 25 bp, Probe Sequence
ttgtcacagaattttgagacccatt

SEQ ID NO: 319483 - DNA, 25 bp, Probe Sequence
ttgtcacagaattttgagacccatt

SEQ ID NO: 319484 - DNA, 25 bp, Probe Sequence
ttgtcacagaattttgagacccatt

SEQ ID NO: 319485 - DNA, 25 bp, Probe Sequence
ttgtcacagaattttgagacccatt

SEQ ID NO: 319486 - DNA, 25 bp, Probe Sequence
ttgtcacagaattttgagacccatt

SEQ ID NO: 319487 - DNA, 25 bp, Probe Sequence
ttgtcaacaatgtcattccacccac

SEQ ID NO: 319488 - DNA, 25 bp, Probe Sequence
ttgtataatcagtcattcatagcac

SEQ ID NO: 319489 - DNA, 25 bp, Probe Sequence
ttggaaatgcagtctctctcatact

SEQ ID NO: 319490 - DNA, 25 bp, Probe Sequence
ttggcctcagagtctctgatcaagc

SEQ ID NO: 319491 - DNA, 25 bp, Probe Sequence
ttgggcatcgatctctgaaagctca

SEQ ID NO: 319492 - DNA, 25 bp, Probe Sequence
ttggagtcaatcctctgatacagct

SEQ ID NO: 319493 - DNA, 25 bp, Probe Sequence
ttggtgtagacagtctgaacagttt

SEQ ID NO: 319494 - DNA, 25 bp, Probe Sequence
ttgtctctgagacctcttaagttct

SEQ ID NO: 319495 - DNA, 25 bp, Probe Sequence
ttgtttgaatgcctctaaagcccat

SEQ ID NO: 319496 - DNA, 25 bp, Probe Sequence
ttgttataatgccttgtaaatgctt

SEQ ID NO: 319497 - DNA, 25 bp, Probe Sequence
ttggtagatatcctttattagttta

SEQ ID NO: 319498 - DNA, 25 bp, Probe Sequence
ttggtaactcaaatagtgtagtatt

SEQ ID NO: 319499 - DNA, 25 bp, Probe Sequence
ttggttaaaagcaagtcatagttct

SEQ ID NO: 319500 - DNA, 25 bp, Probe Sequence
ttggtctaaaagtgtggggattcca

SEQ ID NO: 319501 - DNA, 25 bp, Probe Sequence
ttgggccaaaagggatggaggcttt

SEQ ID NO: 319502 - DNA, 25 bp, Probe Sequence
ttgtacgcaaatggcggttaggcgt

SEQ ID NO: 319503 - DNA, 25 bp, Probe Sequence
ttgttccacacaccggttgagggga

SEQ ID NO: 319504 - DNA, 25 bp, Probe Sequence
ttgtttgcaacgaccgtctggggaa

SEQ ID NO: 319505 - DNA, 25 bp, Probe Sequence
ttgtgagtttcacccagtctgggga

SEQ ID NO: 319506 - DNA, 25 bp, Probe Sequence
ttgtgagcttttttgacctgcggga

SEQ ID NO: 319507 - DNA, 25 bp, Probe Sequence
ttggatgttttactgtgcctggcta

SEQ ID NO: 319508 - DNA, 25 bp, Probe Sequence
ttgtgatttgttttccctgagttcc

SEQ ID NO: 319509 - DNA, 25 bp, Probe Sequence
ttgtgttccttttccacagattgtc

SEQ ID NO: 319510 - DNA, 25 bp, Probe Sequence
ttgtgtttttcttctgccaatttac

SEQ ID NO: 319511 - DNA, 25 bp, Probe Sequence
ttggttttctcttctaagtttctgt

SEQ ID NO: 319512 - DNA, 25 bp, Probe Sequence
ttggtcatctttatttagtttgcat

SEQ ID NO: 319513 - DNA, 25 bp, Probe Sequence
ttggtcttttttatgatggagatca

SEQ ID NO: 319514 - DNA, 25 bp, Probe Sequence
ttggtttgtttgtcattaaagatat

SEQ ID NO: 319515 - DNA, 25 bp, Probe Sequence
ttgtctttgtttgcattgtataact

SEQ ID NO: 319516 - DNA, 25 bp, Probe Sequence
ttgtttatgttttcttgactatact

SEQ ID NO: 319517 - DNA, 25 bp, Probe Sequence
ttgttggagttttcactctcttagc

SEQ ID NO: 319518 - DNA, 25 bp, Probe Sequence
ttgtgtgggtttactctgtgctaag

SEQ ID NO: 319519 - DNA, 25 bp, Probe Sequence
ttgtgtgacgtgatcctcatggtcc

SEQ ID NO: 319520 - DNA, 25 bp, Probe Sequence
ttggtgacagtggaatctttgtctc

SEQ ID NO: 319521 - DNA, 25 bp, Probe Sequence
ttggtgacagtctcaccagtctctc

SEQ ID NO: 319522 - DNA, 25 bp, Probe Sequence
ttggctggcaactctgaagtcatcc

SEQ ID NO: 319523 - DNA, 25 bp, Probe Sequence
ttggtatcagacccgaagcgcacca

SEQ ID NO: 319524 - DNA, 25 bp, Probe Sequence
ttggtattgtctcctggggcaccaa

SEQ ID NO: 319525 - DNA, 25 bp, Probe Sequence
ttggtatttctgtggggtcactggt

SEQ ID NO: 319526 - DNA, 25 bp, Probe Sequence
ttggattttcagtaggggacagttg

SEQ ID NO: 319527 - DNA, 25 bp, Probe Sequence
ttggcctttggaagggaacatgttg

SEQ ID NO: 319528 - DNA, 25 bp, Probe Sequence
ttggctctttggaggcgagaggaag

SEQ ID NO: 319529 - DNA, 25 bp, Probe Sequence
ttggccagttggatgtcaaggataa

SEQ ID NO: 319530 - DNA, 25 bp, Probe Sequence
ttgtcaccctggctgctaaagtaaa

SEQ ID NO: 319531 - DNA, 25 bp, Probe Sequence
ttgtcacccacgctggaatgcagtg

SEQ ID NO: 319532 - DNA, 25 bp, Probe Sequence
ttgtgcacccactttgactatgagt

SEQ ID NO: 319533 - DNA, 25 bp, Probe Sequence
ttgtctcctcctttaactgagtcat

SEQ ID NO: 319534 - DNA, 25 bp, Probe Sequence
ttggctcccctaatgacctaaatac

SEQ ID NO: 319535 - DNA, 25 bp, Probe Sequence
ttggccctctgaaaacactcagaaa

SEQ ID NO: 319536 - DNA, 25 bp, Probe Sequence
ttggcctctccataagccttggagg

SEQ ID NO: 319537 - DNA, 25 bp, Probe Sequence
ttgtcctttcagaaggccgtgaagc

SEQ ID NO: 319538 - DNA, 25 bp, Probe Sequence
ttgtgcacttttacaagccgcaaag

SEQ ID NO: 319539 - DNA, 25 bp, Probe Sequence
ttgttctgtgtttgaagccatgaaa

SEQ ID NO: 319540 - DNA, 25 bp, Probe Sequence
ttgttctatgtcagcacatcccgaa

SEQ ID NO: 319541 - DNA, 25 bp, Probe Sequence
ttgtatcttgtatttatccctgaac

SEQ ID NO: 319542 - DNA, 25 bp, Probe Sequence
ttgtatcctggcaaatactcctgca

SEQ ID NO: 319543 - DNA, 25 bp, Probe Sequence
ttgtctgcactgttcaaacctctgc

SEQ ID NO: 319544 - DNA, 25 bp, Probe Sequence
ttggagcactgaccagaacacttcg

SEQ ID NO: 319545 - DNA, 25 bp, Probe Sequence
ttgtggctgtgagcaaccacttgag

SEQ ID NO: 319546 - DNA, 25 bp, Probe Sequence
ttgggtgtgacctcacagtccagac

SEQ ID NO: 319547 - DNA, 25 bp, Probe Sequence
ttggagtaaccaaacagtatgcaaa

SEQ ID NO: 319548 - DNA, 25 bp, Probe Sequence
ttggagtgcaatccttacttgagaa

SEQ ID NO: 319549 - DNA, 25 bp, Probe Sequence
ttgtcaggcgatccgtactgtgaga

SEQ ID NO: 319550 - DNA, 25 bp, Probe Sequence
ttgtcgatgccaccgcatttataga

SEQ ID NO: 319551 - DNA, 25 bp, Probe Sequence
ttgttgacgcatgagctgtttaaaa

SEQ ID NO: 319552 - DNA, 25 bp, Probe Sequence
ttgttgatctgagccttctatgaaa

SEQ ID NO: 319553 - DNA, 25 bp, Probe Sequence
ttgtgtgatctagacatgccttagg

SEQ ID NO: 319554 - DNA, 25 bp, Probe Sequence
ttgttgaatcgccaagcacttgaag

SEQ ID NO: 319555 - DNA, 25 bp, Probe Sequence
ttgtgtgagcatggaaaactataga

SEQ ID NO: 319556 - DNA, 25 bp, Probe Sequence
ttggtgtatcgataatcatttaaaa

SEQ ID NO: 319557 - DNA, 25 bp, Probe Sequence
ttggtttctcatcacatttgtaaat

SEQ ID NO: 319558 - DNA, 25 bp, Probe Sequence
ttgttttctcaaatatttgctatga

SEQ ID NO: 319559 - DNA, 25 bp, Probe Sequence
ttgtcattttcatttcagttgtaac

SEQ ID NO: 319560 - DNA, 25 bp, Probe Sequence
ttgtctatcttcattagtcttcaaa

SEQ ID NO: 319561 - DNA, 25 bp, Probe Sequence
ttgttgttactttagttcatcagaa

SEQ ID NO: 319562 - DNA, 25 bp, Probe Sequence
ttgtagttttttattcatgctgaat

SEQ ID NO: 319563 - DNA, 25 bp, Probe Sequence
ttgtgtgtattttttgttcagctaa

SEQ ID NO: 319564 - DNA, 25 bp, Probe Sequence
ttgtgctgttttccattttcatgcc

SEQ ID NO: 319565 - DNA, 25 bp, Probe Sequence
ttgtcttctttccatctgtggagtc

SEQ ID NO: 319566 - DNA, 25 bp, Probe Sequence
ttgtcttctcaaattctgtaggatc

SEQ ID NO: 319567 - DNA, 25 bp, Probe Sequence
ttgtcttgtcatcattcgtcagcga

SEQ ID NO: 319568 - DNA, 25 bp, Probe Sequence
ttgtcttgtcatcattcgtcagcga

SEQ ID NO: 319569 - DNA, 25 bp, Probe Sequence
ttgtccttgcagctgtagtcactgg

SEQ ID NO: 319570 - DNA, 25 bp, Probe Sequence
ttgtccttgcagctgtagtcactgg

SEQ ID NO: 319571 - DNA, 25 bp, Probe Sequence
ttgtccttgcagctgtagtcactgg

SEQ ID NO: 319572 - DNA, 25 bp, Probe Sequence
ttgtccaatggccgctagtgactca

SEQ ID NO: 319573 - DNA, 25 bp, Probe Sequence
ttgtaactgtgtcccagtgaccaaa

SEQ ID NO: 319574 - DNA, 25 bp, Probe Sequence
ttgtacatttgagccatgtcacaca

SEQ ID NO: 319575 - DNA, 25 bp, Probe Sequence
ttggatatttgaggccatgcttaat

SEQ ID NO: 319576 - DNA, 25 bp, Probe Sequence
ttggcaacttgagctctcccaatta

SEQ ID NO: 319577 - DNA, 25 bp, Probe Sequence
ttggcaattgtaactccatctaatc

SEQ ID NO: 319578 - DNA, 25 bp, Probe Sequence
ttggtagcttctatccactcagatc

SEQ ID NO: 319579 - DNA, 25 bp, Probe Sequence
ttggaacttcagagctcaggcaggc

SEQ ID NO: 319580 - DNA, 25 bp, Probe Sequence
ttggcaagtatggaagcagaggcag

SEQ ID NO: 319581 - DNA, 25 bp, Probe Sequence
ttggcggcttgtgcagcaatggcca

SEQ ID NO: 319582 - DNA, 25 bp, Probe Sequence
ttggggactgagacaaagtgccatt

SEQ ID NO: 319583 - DNA, 25 bp, Probe Sequence
ttggggacttgtagggatgcctttc

SEQ ID NO: 319584 - DNA, 25 bp, Probe Sequence
ttgggccctatttagttgcttcttc

SEQ ID NO: 319585 - DNA, 25 bp, Probe Sequence
ttggctcctctaaacatttgctgtt

SEQ ID NO: 319586 - DNA, 25 bp, Probe Sequence
ttggtgcctctgcagtacttgatgt

SEQ ID NO: 319587 - DNA, 25 bp, Probe Sequence
ttggagcttctggttcctatcagtt

SEQ ID NO: 319588 - DNA, 25 bp, Probe Sequence
ttgtggcttctgagctccaatcaca

SEQ ID NO: 319589 - DNA, 25 bp, Probe Sequence
ttgtatctccttagctgctcaataa

SEQ ID NO: 319590 - DNA, 25 bp, Probe Sequence
ttggatcacgtattgctgctctaaa

SEQ ID NO: 319591 - DNA, 25 bp, Probe Sequence
ttggtactctgattcctctggaaag

SEQ ID NO: 319592 - DNA, 25 bp, Probe Sequence
ttggggttgcaacctcgggaagcca

SEQ ID NO: 319593 - DNA, 25 bp, Probe Sequence
ttggtttgtcaccctcgataaagga

SEQ ID NO: 319594 - DNA, 25 bp, Probe Sequence
ttgggttgatcccacctatgagatc

SEQ ID NO: 319595 - DNA, 25 bp, Probe Sequence
ttggacttgcattcccttatgatgg

SEQ ID NO: 319596 - DNA, 25 bp, Probe Sequence
ttggactggatccaccactatgtcc

SEQ ID NO: 319597 - DNA, 25 bp, Probe Sequence
ttggactggatccaccactatgtcc

SEQ ID NO: 319598 - DNA, 25 bp, Probe Sequence
ttggactggatccaccactatgtcc

SEQ ID NO: 319599 - DNA, 25 bp, Probe Sequence
ttggctgctggtgactcaatctgcc

SEQ ID NO: 319600 - DNA, 25 bp, Probe Sequence
ttggctgctggtgactcaatctgcc

SEQ ID NO: 319601 - DNA, 25 bp, Probe Sequence
ttggcagctgggtagctctttgaag

SEQ ID NO: 319602 - DNA, 25 bp, Probe Sequence
ttggagtgtcagcagctatagtgaa

SEQ ID NO: 319603 - DNA, 25 bp, Probe Sequence
ttggcctgtcagagcttgattagaa

SEQ ID NO: 319604 - DNA, 25 bp, Probe Sequence
ttggccatgttgttctctgagatag

SEQ ID NO: 319605 - DNA, 25 bp, Probe Sequence
ttggccagtctgtacctggacttcg

SEQ ID NO: 319606 - DNA, 25 bp, Probe Sequence
ttggccaggctggtcttgtgaactc

SEQ ID NO: 319607 - DNA, 25 bp, Probe Sequence
ttggctgcagttgtctgttactctt

SEQ ID NO: 319608 - DNA, 25 bp, Probe Sequence
ttgtgggtcacactctttacatttc

SEQ ID NO: 319609 - DNA, 25 bp, Probe Sequence
ttggagggcatctgccttactgatt

SEQ ID NO: 319610 - DNA, 25 bp, Probe Sequence
ttgtggacgatcagcctgtactgcc

SEQ ID NO: 319611 - DNA, 25 bp, Probe Sequence
ttgtcagacataaagccatgtttcc

SEQ ID NO: 319612 - DNA, 25 bp, Probe Sequence
ttgtagcattcaatagctttattcc

SEQ ID NO: 319613 - DNA, 25 bp, Probe Sequence
ttgtatgtgtcactagtgtctaatg

SEQ ID NO: 319614 - DNA, 25 bp, Probe Sequence
ttgtgtggtcagtaggtgcggtgtc

SEQ ID NO: 319615 - DNA, 25 bp, Probe Sequence
ttgtgctggtgctgaggatggcagt

SEQ ID NO: 319616 - DNA, 25 bp, Probe Sequence
ttgtgatggtcaacagcgtggcgct

SEQ ID NO: 319617 - DNA, 25 bp, Probe Sequence
ttggtggtcagatcgtgggccaggc

SEQ ID NO: 319618 - DNA, 25 bp, Probe Sequence
ttggggacctagcctggagtcagga

SEQ ID NO: 319619 - DNA, 25 bp, Probe Sequence
ttggggcaccaaatctgaagacaaa

SEQ ID NO: 319620 - DNA, 25 bp, Probe Sequence
ttgtgaagcccaagatcgtcaaaaa

SEQ ID NO: 319621 - DNA, 25 bp, Probe Sequence
ttgtgacaccctatcttgtcaataa

SEQ ID NO: 319622 - DNA, 25 bp, Probe Sequence
ttgtggccccagacttttaaaacag

SEQ ID NO: 319623 - DNA, 25 bp, Probe Sequence
ttgggctcccagacgtgctggaaag

SEQ ID NO: 319624 - DNA, 25 bp, Probe Sequence
ttggcctcccaaggtgctgagatta

SEQ ID NO: 319625 - DNA, 25 bp, Probe Sequence
ttggcctaccaactgtagatgtata

SEQ ID NO: 319626 - DNA, 25 bp, Probe Sequence
ttggagattccaactctaatgtcaa

SEQ ID NO: 319627 - DNA, 25 bp, Probe Sequence
ttgggtgatgccttcccagagtcaa

SEQ ID NO: 319628 - DNA, 25 bp, Probe Sequence
ttggagtgacgcatctccaagccaa

SEQ ID NO: 319629 - DNA, 25 bp, Probe Sequence
ttggcgtgccaggtgtctacaccaa

SEQ ID NO: 319630 - DNA, 25 bp, Probe Sequence
ttggccacacaggctatctgaacac

SEQ ID NO: 319631 - DNA, 25 bp, Probe Sequence
ttggaccagcctgtgctagagcagc

SEQ ID NO: 319632 - DNA, 25 bp, Probe Sequence
ttggaccagaccctgctggaactca

SEQ ID NO: 319633 - DNA, 25 bp, Probe Sequence
ttggtctcaaggctctggaactgtg

SEQ ID NO: 319634 - DNA, 25 bp, Probe Sequence
ttggctctacagcgttgcagaacat

SEQ ID NO: 319635 - DNA, 25 bp, Probe Sequence
ttgtctcttcaccgtgttaacataa

SEQ ID NO: 319636 - DNA, 25 bp, Probe Sequence
ttgtctcctcacctgcaatattaaa

SEQ ID NO: 319637 - DNA, 25 bp, Probe Sequence
ttggcctctatcctaatgactcaaa

SEQ ID NO: 319638 - DNA, 25 bp, Probe Sequence
ttggtctagtgccatagtcctcaac

SEQ ID NO: 319639 - DNA, 25 bp, Probe Sequence
ttggtgccgtggagcacctacagct

SEQ ID NO: 319640 - DNA, 25 bp, Probe Sequence
ttgtggccctggagagtcaccagca

SEQ ID NO: 319641 - DNA, 25 bp, Probe Sequence
ttgtggccaggggcaggtaccatcc

SEQ ID NO: 319642 - DNA, 25 bp, Probe Sequence
ttgtctccaggggaaagagccaccc

SEQ ID NO: 319643 - DNA, 25 bp, Probe Sequence
ttgtgtctttcggaaaagccccgtg

SEQ ID NO: 319644 - DNA, 25 bp, Probe Sequence
ttgtgtctccttcaaaatccttttg

SEQ ID NO: 319645 - DNA, 25 bp, Probe Sequence
ttgtttctctactaagaactctttc

SEQ ID NO: 319646 - DNA, 25 bp, Probe Sequence
ttgttattctatttcgataatattt

SEQ ID NO: 319647 - DNA, 25 bp, Probe Sequence
ttgtgtatttaactcattgaacttt

SEQ ID NO: 319648 - DNA, 25 bp, Probe Sequence
ttgtgcccttaactacgaactgaat

SEQ ID NO: 319649 - DNA, 25 bp, Probe Sequence
ttgtggccttagctacaggagagaa

SEQ ID NO: 319650 - DNA, 25 bp, Probe Sequence
ttggaccaatagcccacagctgaga

SEQ ID NO: 319651 - DNA, 25 bp, Probe Sequence
ttggtggaaatgcctccgctgaagg

SEQ ID NO: 319652 - DNA, 25 bp, Probe Sequence
ttggggaaaaggacagatgaagctg

SEQ ID NO: 319653 - DNA, 25 bp, Probe Sequence
ttggaagagcaagggacagtgaggc

SEQ ID NO: 319654 - DNA, 25 bp, Probe Sequence
ttggaagtcatcttggagcgtatgg

SEQ ID NO: 319655 - DNA, 25 bp, Probe Sequence
ttggctagccatgtgcagaggattg

SEQ ID NO: 319656 - DNA, 25 bp, Probe Sequence
ttggcaagctcaagtcagcccatct

SEQ ID NO: 319657 - DNA, 25 bp, Probe Sequence
ttggcactgtgtagtcatggcccat

SEQ ID NO: 319658 - DNA, 25 bp, Probe Sequence
ttggcatttgtgaatcatgctgtta

SEQ ID NO: 319659 - DNA, 25 bp, Probe Sequence
ttgtgcatattgtgatgaggttaaa

SEQ ID NO: 319660 - DNA, 25 bp, Probe Sequence
ttgtcttatgggaagtttaactaag

SEQ ID NO: 319661 - DNA, 25 bp, Probe Sequence
ttggttctgggaagtgtgaaatcaa

SEQ ID NO: 319662 - DNA, 25 bp, Probe Sequence
ttggctcgcgggattgatgtgcaac

SEQ ID NO: 319663 - DNA, 25 bp, Probe Sequence
ttggccaggtggaatatgacccatc

SEQ ID NO: 319664 - DNA, 25 bp, Probe Sequence
ttggcaagttggccaagactcccct

SEQ ID NO: 319665 - DNA, 25 bp, Probe Sequence
ttggcaagttggccaagactcccct

SEQ ID NO: 319666 - DNA, 25 bp, Probe Sequence
ttggcaatgtttctaccagccacct

SEQ ID NO: 319667 - DNA, 25 bp, Probe Sequence
ttgtgacggttgctacctggatcca

SEQ ID NO: 319668 - DNA, 25 bp, Probe Sequence
ttgtgacccattttactctggataa

SEQ ID NO: 319669 - DNA, 25 bp, Probe Sequence
ttgtgacccttgttaccaaaacaca

SEQ ID NO: 319670 - DNA, 25 bp, Probe Sequence
ttgtacacactttatagtccataaa

SEQ ID NO: 319671 - DNA, 25 bp, Probe Sequence
ttgtatcaactttgtgagtaataat

SEQ ID NO: 319672 - DNA, 25 bp, Probe Sequence
ttgtgctgtactttgtgcgtagaaa

SEQ ID NO: 319673 - DNA, 25 bp, Probe Sequence
ttgtgctgtggcctttgctaaaaaa

SEQ ID NO: 319674 - DNA, 25 bp, Probe Sequence
ttgtgctgtcgccttttagaaggag

SEQ ID NO: 319675 - DNA, 25 bp, Probe Sequence
ttgtgcagatcactttttaaactca

SEQ ID NO: 319676 - DNA, 25 bp, Probe Sequence
ttgtgcaatacagtttcattaactc

SEQ ID NO: 319677 - DNA, 25 bp, Probe Sequence
ttgtgaatgagagttggcatgtcaa

SEQ ID NO: 319678 - DNA, 25 bp, Probe Sequence
ttgtggcatgacatctgggtcatct

SEQ ID NO: 319679 - DNA, 25 bp, Probe Sequence
ttgtagtgagttgcggtcatcttcc

SEQ ID NO: 319680 - DNA, 25 bp, Probe Sequence
ttgtttggtctctggttttcatcct

SEQ ID NO: 319681 - DNA, 25 bp, Probe Sequence
ttgtttggtctctggttttcatcct

SEQ ID NO: 319682 - DNA, 25 bp, Probe Sequence
ttgtgttgggtatcagtatcttctc

SEQ ID NO: 319683 - DNA, 25 bp, Probe Sequence
ttggtctgtgggtccagtgttgtct

SEQ ID NO: 319684 - DNA, 25 bp, Probe Sequence
ttgggtaggtgacctgcttggatct

SEQ ID NO: 319685 - DNA, 25 bp, Probe Sequence
ttgtgagtggggcatctgttggact

SEQ ID NO: 319686 - DNA, 25 bp, Probe Sequence
ttggagtgctggagactttggatcg

SEQ ID NO: 319687 - DNA, 25 bp, Probe Sequence
ttgtgtgtctggagtcttggctact

SEQ ID NO: 319688 - DNA, 25 bp, Probe Sequence
ttgtgctgttcgtagtttgtataat

SEQ ID NO: 319689 - DNA, 25 bp, Probe Sequence
ttgtgtctttgctatgctttttatc

SEQ ID NO: 319690 - DNA, 25 bp, Probe Sequence
ttgtcatctttcttctattttattc

SEQ ID NO: 319691 - DNA, 25 bp, Probe Sequence
ttgtatcgtgtggtgtattttttaa

SEQ ID NO: 319692 - DNA, 25 bp, Probe Sequence
ttgtgtgtgtgtgtgttttcttgtg

SEQ ID NO: 319693 - DNA, 25 bp, Probe Sequence
ttgtgtgtgtgtgtgttttcttgtg

SEQ ID NO: 319694 - DNA, 25 bp, Probe Sequence
ttgtgtgtgttcactgtttctcagt

SEQ ID NO: 319695 - DNA, 25 bp, Probe Sequence
ttgtttgatttggctcttgttcttt

SEQ ID NO: 319696 - DNA, 25 bp, Probe Sequence
ttgggctgctgtagcctattttttt

SEQ ID NO: 319697 - DNA, 25 bp, Probe Sequence
ttggggatggtcattttctttcttt

SEQ ID NO: 319698 - DNA, 25 bp, Probe Sequence
ttgtgggaggccagttctggtccgt

SEQ ID NO: 319699 - DNA, 25 bp, Probe Sequence
ttggttgaggccttgttctgagccc

SEQ ID NO: 319700 - DNA, 25 bp, Probe Sequence
ttggttggtgacttgctattctgcc

SEQ ID NO: 319701 - DNA, 25 bp, Probe Sequence
ttggtttgtgaatccatcttgcttt

SEQ ID NO: 319702 - DNA, 25 bp, Probe Sequence
ttgggaaatgactccatttctattg

SEQ ID NO: 319703 - DNA, 25 bp, Probe Sequence
ttgggaaatgccgcccatttaagta

SEQ ID NO: 319704 - DNA, 25 bp, Probe Sequence
ttggggaagctggctccctattcat

SEQ ID NO: 319705 - DNA, 25 bp, Probe Sequence
ttgggaaagcatggcaccctcagac

SEQ ID NO: 319706 - DNA, 25 bp, Probe Sequence
ttggtgtccagtgaccctgagatca

SEQ ID NO: 319707 - DNA, 25 bp, Probe Sequence
ttggtgctcacgtgtccttaacacc

SEQ ID NO: 319708 - DNA, 25 bp, Probe Sequence
ttggtgtacagacttcttggtaccc

SEQ ID NO: 319709 - DNA, 25 bp, Probe Sequence
ttgtgtgtcacaaaatttggtattc

SEQ ID NO: 319710 - DNA, 25 bp, Probe Sequence
ttggtgcctataattgattggtcat

SEQ ID NO: 319711 - DNA, 25 bp, Probe Sequence
ttggtgccttgtttaatggtctgac

SEQ ID NO: 319712 - DNA, 25 bp, Probe Sequence
ttggtgccttgtttaatggtctgac

SEQ ID NO: 319713 - DNA, 25 bp, Probe Sequence
ttggtgccttgtttaatggtctgac

SEQ ID NO: 319714 - DNA, 25 bp, Probe Sequence
ttggtgccttgtttaatggtctgac

SEQ ID NO: 319715 - DNA, 25 bp, Probe Sequence
ttggtgccttgtttaatggtctgac

SEQ ID NO: 319716 - DNA, 25 bp, Probe Sequence
ttgggccgcttggtcaaggacatga

SEQ ID NO: 319717 - DNA, 25 bp, Probe Sequence
ttgggctcacttctaataactgcag

SEQ ID NO: 319718 - DNA, 25 bp, Probe Sequence
ttgggctcacttctaataactgcag

SEQ ID NO: 319719 - DNA, 25 bp, Probe Sequence
ttgggccatcaatcggaaactcatg

SEQ ID NO: 319720 - DNA, 25 bp, Probe Sequence
ttgggccatagtttgttaatctcaa

SEQ ID NO: 319721 - DNA, 25 bp, Probe Sequence
ttgtgcccttgatttttatctccaa

SEQ ID NO: 319722 - DNA, 25 bp, Probe Sequence
ttgtctaccagtttttgtctccaga

SEQ ID NO: 319723 - DNA, 25 bp, Probe Sequence
ttggtaccagtgttttgtctttagc

SEQ ID NO: 319724 - DNA, 25 bp, Probe Sequence
ttggttgccactttaggtctattcc

SEQ ID NO: 319725 - DNA, 25 bp, Probe Sequence
ttggttccctaaagcactttcttct

SEQ ID NO: 319726 - DNA, 25 bp, Probe Sequence
ttggtatctggtatacttttcttct

SEQ ID NO: 319727 - DNA, 25 bp, Probe Sequence
ttggttgtggtagtcctgttttcct

SEQ ID NO: 319728 - DNA, 25 bp, Probe Sequence
ttggttgtggtagtcctgttttcct

SEQ ID NO: 319729 - DNA, 25 bp, Probe Sequence
ttggcatttagtaaccttaattctt

SEQ ID NO: 319730 - DNA, 25 bp, Probe Sequence
ttggctttgattacacactaagttt

SEQ ID NO: 319731 - DNA, 25 bp, Probe Sequence
ttggctttgcaaaacagctgagagc

SEQ ID NO: 319732 - DNA, 25 bp, Probe Sequence
ttggtctctgcagttaagtgccatg

SEQ ID NO: 319733 - DNA, 25 bp, Probe Sequence
ttgtgattctgagcttgcaatgccg

SEQ ID NO: 319734 - DNA, 25 bp, Probe Sequence
ttgtcatgtcgagctccgagagctg

SEQ ID NO: 319735 - DNA, 25 bp, Probe Sequence
ttgtctgtgcaagacctgcagctgc

SEQ ID NO: 319736 - DNA, 25 bp, Probe Sequence
ttgtgctgtcaatacctcatactgc

SEQ ID NO: 319737 - DNA, 25 bp, Probe Sequence
ttggctgtcatttagctctctggcc

SEQ ID NO: 319738 - DNA, 25 bp, Probe Sequence
ttggcattgctttatctcactggat

SEQ ID NO: 319739 - DNA, 25 bp, Probe Sequence
ttgtgattatcttctccacatctga

SEQ ID NO: 319740 - DNA, 25 bp, Probe Sequence
ttgtgtgcttgcatccaactgtgat

SEQ ID NO: 319741 - DNA, 25 bp, Probe Sequence
ttgtgtgtgtgcacgcatggctgag

SEQ ID NO: 319742 - DNA, 25 bp, Probe Sequence
ttggcagtagcatcgatgtgctgtg

SEQ ID NO: 319743 - DNA, 25 bp, Probe Sequence
ttggcagtacatcaatggcgtggat

SEQ ID NO: 319744 - DNA, 25 bp, Probe Sequence
ttgtcagtacatcaatgggcgtgga

SEQ ID NO: 319745 - DNA, 25 bp, Probe Sequence
ttgtcagtacatcaatgggcgtgga

SEQ ID NO: 319746 - DNA, 25 bp, Probe Sequence
ttggcagtacatcattgggcgtgga

SEQ ID NO: 319747 - DNA, 25 bp, Probe Sequence
ttggcagtacatcaatgggcgtgga

SEQ ID NO: 319748 - DNA, 25 bp, Probe Sequence
ttggcagtacatcaatgggcgtgga

SEQ ID NO: 319749 - DNA, 25 bp, Probe Sequence
ttggcagtacatcaatgggcgtgga

SEQ ID NO: 319750 - DNA, 25 bp, Probe Sequence
ttggcagtacatcaatgggcgtgga

SEQ ID NO: 319751 - DNA, 25 bp, Probe Sequence
ttggcagtacatcaatgggcgtgga

SEQ ID NO: 319752 - DNA, 25 bp, Probe Sequence
ttggcagtacatcaatgggcgtgga

SEQ ID NO: 319753 - DNA, 25 bp, Probe Sequence
ttggcagtacatcaatgggcgtgga

SEQ ID NO: 319754 - DNA, 25 bp, Probe Sequence
ttggcagtacatcaatgggcgtgga

SEQ ID NO: 319755 - DNA, 25 bp, Probe Sequence
ttggcagtacatcaatgggcgtgga

SEQ ID NO: 319756 - DNA, 25 bp, Probe Sequence
ttggcagtacatcaatgggcgtgga

SEQ ID NO: 319757 - DNA, 25 bp, Probe Sequence
ttggcagtacatcaatgggcgtgga

SEQ ID NO: 319758 - DNA, 25 bp, Probe Sequence
ttggcagtacatcaatgggcgtgga

SEQ ID NO: 319759 - DNA, 25 bp, Probe Sequence
ttggcagtacatcaatgggcgtgga

SEQ ID NO: 319760 - DNA, 25 bp, Probe Sequence
ttggcagtacatcaatgggcgtgga

SEQ ID NO: 319761 - DNA, 25 bp, Probe Sequence
ttggcagtacatcaatgggcgtgga

SEQ ID NO: 319762 - DNA, 25 bp, Probe Sequence
ttggcagtacatcaatgggcgtgga

SEQ ID NO: 319763 - DNA, 25 bp, Probe Sequence
ttggcagtacatcaatgggcgtgga

SEQ ID NO: 319764 - DNA, 25 bp, Probe Sequence
ttggcagtacatcaatgggcgtgga

SEQ ID NO: 319765 - DNA, 25 bp, Probe Sequence
ttggcagtacatcaatgggcgtgga

SEQ ID NO: 319766 - DNA, 25 bp, Probe Sequence
ttggcagtacatcaatgggcgtgga

SEQ ID NO: 319767 - DNA, 25 bp, Probe Sequence
ttggcagtacatcaatgggcgtgga

SEQ ID NO: 319768 - DNA, 25 bp, Probe Sequence
ttggcagtacatcaatgggcgtgga

SEQ ID NO: 319769 - DNA, 25 bp, Probe Sequence
ttggcagtacatcaatgggcgtgga

SEQ ID NO: 319770 - DNA, 25 bp, Probe Sequence
ttggcagtacatcaatgggcgtgga

SEQ ID NO: 319771 - DNA, 25 bp, Probe Sequence
ttggcagtacatcaatgggcgtgga

SEQ ID NO: 319772 - DNA, 25 bp, Probe Sequence
ttggcagtacatcaatgggcgtgga

SEQ ID NO: 319773 - DNA, 25 bp, Probe Sequence
ttggcagtacatcaatgggcgtgga

SEQ ID NO: 319774 - DNA, 25 bp, Probe Sequence
ttggcagtacatcaatgggcgtgga

SEQ ID NO: 319775 - DNA, 25 bp, Probe Sequence
ttggcagtacatcaatgggcgtgga

SEQ ID NO: 319776 - DNA, 25 bp, Probe Sequence
ttggcagtacatcaatgggcgtgga

SEQ ID NO: 319777 - DNA, 25 bp, Probe Sequence
ttggcagtacatcaatgggcgtgga

SEQ ID NO: 319778 - DNA, 25 bp, Probe Sequence
ttggcagtacatcaatgggcgtgga

SEQ ID NO: 319779 - DNA, 25 bp, Probe Sequence
ttggcagtaacatcatgggcgtgga

SEQ ID NO: 319780 - DNA, 25 bp, Probe Sequence
ttggcagtaacatcaatgggcgtgg

SEQ ID NO: 319781 - DNA, 25 bp, Probe Sequence
ttggaggcaggatcacaggctcggg

SEQ ID NO: 319782 - DNA, 25 bp, Probe Sequence
ttggtgctgtggtgaaggcgcggga

SEQ ID NO: 319783 - DNA, 25 bp, Probe Sequence
ttggtgcccgacaaatgggctgggc

SEQ ID NO: 319784 - DNA, 25 bp, Probe Sequence
ttgggccgcagacacaggagtggga

SEQ ID NO: 319785 - DNA, 25 bp, Probe Sequence
ttggcaccgagagatcgtacgggac

SEQ ID NO: 319786 - DNA, 25 bp, Probe Sequence
ttggaggtggcagacgttctggaga

SEQ ID NO: 319787 - DNA, 25 bp, Probe Sequence
ttgtgaggtgactccagtatctgga

SEQ ID NO: 319788 - DNA, 25 bp, Probe Sequence
ttggcaggctgatttctaggtagga

SEQ ID NO: 319789 - DNA, 25 bp, Probe Sequence
ttgtcaagctcatttcctggtatga

SEQ ID NO: 319790 - DNA, 25 bp, Probe Sequence
ttgtgcattgctttatttagttgaa

SEQ ID NO: 319791 - DNA, 25 bp, Probe Sequence
ttggcctgtttgatgtatgtgtgaa

SEQ ID NO: 319792 - DNA, 25 bp, Probe Sequence
ttggccctattcatgctcatatgta

SEQ ID NO: 319793 - DNA, 25 bp, Probe Sequence
ttggtactcttcattcatttatctc

SEQ ID NO: 319794 - DNA, 25 bp, Probe Sequence
ttggacagctttaattcacttgttc

SEQ ID NO: 319795 - DNA, 25 bp, Probe Sequence
ttggacagctttaaacagagttgat

SEQ ID NO: 319796 - DNA, 25 bp, Probe Sequence
ttggtctcatttcagacgagtccat

SEQ ID NO: 319797 - DNA, 25 bp, Probe Sequence
ttggttgatgttaaggccctccatt

SEQ ID NO: 319798 - DNA, 25 bp, Probe Sequence
ttggttgatgttaaggccctccatt

SEQ ID NO: 319799 - DNA, 25 bp, Probe Sequence
ttggggtggatgcagccacctccat

SEQ ID NO: 319800 - DNA, 25 bp, Probe Sequence
ttgtggtaggatcagccctcatttt

SEQ ID NO: 319801 - DNA, 25 bp, Probe Sequence
ttggcgaagtatgggccttatttta

SEQ ID NO: 319802 - DNA, 25 bp, Probe Sequence
ttggctaagtacccacttaagagct

SEQ ID NO: 319803 - DNA, 25 bp, Probe Sequence
ttggatacattaactcacttaggag

SEQ ID NO: 319804 - DNA, 25 bp, Probe Sequence
ttggtcacatatagttagttaccag

SEQ ID NO: 319805 - DNA, 25 bp, Probe Sequence
ttggccaatagcatccttttccagt
